(19) United States
(12) Patent Application Publication
(10) Pub. No.: US 2005/0182007 A1
(43) Pub. Date: Aug. 18, 2005

(54) RNA interference mediated inhibition of interleukin and interleukin receptor gene expression using short interfering nucleic acid (SINA)

(75) Inventors: James McSwiggen, Boulder, CO (US); Leonid Beigelman, Longmont, CO (US)

Correspondence Address: MCDONNELL BOEHNEN HULBERT & BERGHOFF LLP, 300 S. WACKER DRIVE, 32ND FLOOR, CHICAGO, IL, 60606, US

(73) Assignee: Sirna Therapeutics, Inc., Boulder, CO (US)

(21) Appl. No.: 10/922,675

(22) Filed: Aug. 20, 2004

Related U.S. Application Data
(63) Continuation-in-part of application No. 10/863,973, filed on Jun. 9, 2004.
Application No. 10/863,973 is a continuation-in-part of application No. PCT/US03/04566, filed on Feb. 14, 2003.
(63) Continuation-in-part of application No. PCT/US04/16390, filed on May 24, 2004.
Application No. PCT/US04/16390 is a continuation-in-part of application No. 10/826,966, filed on Apr. 16, 2004.
Application No. 10/826,966 is a continuation-in-part of application No. 10/757,803, filed on Jan. 14, 2004.
Application No. 10/757,803 is a continuation-in-part of application No. 10/720,448, filed on Nov. 24, 2003.
Application No. 10/720,448 is a continuation-in-part of application No. 10/693,059, filed on Oct. 23, 2003.
Application No. 10/693,059 is a continuation-in-part of application No. 10/444,853, filed on May 23, 2003.
Application No. 10/444,853 is a continuation-in-part of application No. PCT/US03/05346, filed on Feb. 20, 2003.
Application No. 10/444,853 is a continuation-in-part of application No. PCT/US03/05028, filed on Feb. 20, 2003.
(63) Continuation-in-part of application No. PCT/US04/13456, filed on Apr. 30, 2004.
Application No. PCT/US04/13456 is a continuation-in-part of application No. 10/780,447, filed on Feb. 13, 2004.
Application No. 10/780,447 is a continuation-in-part of application No. 10/427,160, filed on Apr. 30, 2003.
Application No. 10/427,160 is a continuation-in-part of application No. PCT/US02/15876, filed on May 17, 2002.
(63) Continuation-in-part of application No. 10/727,780, filed on Dec. 3, 2003.
(60) Provisional application No. 60/358,580, filed on Feb. 20, 2002.
(60) Provisional application No. 60/358,580, filed on Feb. 20, 2002.
(60) Provisional application No. 60/363,124, filed on Mar. 11, 2002.
(60) Provisional application No. 60/363,124, filed on Mar. 11, 2002.
(60) Provisional application No. 60/386,782, filed on Jun. 6, 2002.
(60) Provisional application No. 60/386,782, filed on Jun. 6, 2002.
(60) Provisional application No. 60/406,784, filed on Aug. 29, 2002.
(60) Provisional application No. 60/406,784, filed on Aug. 29, 2002.
(60) Provisional application No. 60/408,378, filed on Sep. 5, 2002.
(60) Provisional application No. 60/408,378, filed on Sep. 5, 2002.
(60) Provisional application No. 60/409,293, filed on Sep. 9, 2002.
(60) Provisional application No. 60/409,293, filed on Sep. 9, 2002.
(60) Provisional application No. 60/440,129, filed on Jan. 15, 2003.
(60) Provisional application No. 60/440,129, filed on Jan. 15, 2003.
(60) Provisional application No. 60/362,016, filed on Mar. 6, 2002.
(60) Provisional application No. 60/306,883, filed on Jul. 20, 2001.
(60) Provisional application No. 60/311,865, filed on Aug. 13, 2001.
(60) Provisional application No. 60/292,217, filed on May 18, 2001.
(60) Provisional application No. 60/543,480, filed on Feb. 10, 2004.

(51) Int. Cl. A61K 48/00; C12Q 1/68; C07H 21/02

(52) U.S. Cl. 514/44; 536/23.1

(57) ABSTRACT

This invention relates to compounds, compositions, and methods useful for modulating interleukin and/or interleukin receptor gene expression using short interfering nucleic acid (siNA) molecules. This invention also relates to compounds, compositions, and methods useful for modulating the expression and activity of other genes involved in pathways of interleukin and/or interleukin receptor gene expression and/or activity by RNA interference (RNAi) using small nucleic acid molecules. In particular, the instant invention features small nucleic acid molecules, such as short interfering nucleic acid (siNA), short interfering RNA (siRNA), double-stranded RNA (dsRNA), micro-RNA (mRNA), and short hairpin RNA (shRNA) molecules and methods used to modulate the expression of interleukin and/or interleukin receptor genes, IL-1, IL-2, IL-3, IL-4, IL-5, IL-6, IL-7, IL-8, IL-9, IL-10, IL-11, IL-12, IL-13, IL-14, IL-15, IL-16, IL-17, IL-18, IL-19, IL-20, IL-21, IL-22, IL-23, IL-24, IL-25, IL-26, and IL-27 genes and IL-1R, IL-2R, IL-3R, IL-4R, IL-5R, IL-6R, IL-7R, IL-8R, IL-9R, IL-10R, IL-11R, 1L-12R, IL-13R, IL-14R, IL-15R, IL-16R, IL-17R, IL-18R, IL-19R, IL-20R, IL-21R, IL-22R, IL-23R, IL-24R, IL-25R, IL-26R, and IL-27R.

[0001] This application is a continuation-in-part of U.S. patent application Ser. No. 10/863,973, filed Jun. 9, 2004, which is a continuation-in-part of International Patent Application No. PCT/US03/04566, filed Feb. 14, 2003. This application is also a continuation-in-part of International Patent Application No. PCT/US04/16390, filed May 24, 2004, which is a continuation-in-part of U.S. patent application Ser. No. 10/826,966, filed Apr. 16, 2004, which is continuation-in-part of U.S. patent application Ser. No. 10/757,803, filed Jan. 14, 2004, which is a continuation-in-part of U.S. patent application Ser. No. 10/720,448, filed Nov. 24, 2003, which is a continuation-in-part of U.S. patent application Ser. No. 10/693,059, filed Oct. 23, 2003, which is a continuation-in-part of U.S. patent application Ser. No. 10/444,853, filed May 23, 2003, which is a continuation-in-part of International Patent Application No. PCT/US03/05346, filed Feb. 20, 2003, and a continuation-in-part of International Patent Application No. PCT/US03/05028, filed Feb. 20, 2003, both of which claim the benefit of U.S. Provisional Application No. 60/358,580 filed Feb. 20, 2002, U.S. Provisional Application No. 60/363,124 filed Mar. 11, 2002, U.S. Provisional Application No. 60/386,782 filed Jun. 6, 2002, U.S. Provisional Application No. 60/406,784 filed Aug. 29, 2002, U.S. Provisional Application No. 60/408,378 filed Sep. 5, 2002, U.S. Provisional Application No. 60/409,293 filed Sep. 9, 2002, and U.S. Provisional Application No. 60/440,129 filed Jan. 15, 2003. This application is also a continuation-in-part of International Patent Application No. PCT/US04/13456, filed Apr. 30, 2004, which is a continuation-in-part of U.S. patent application Ser. No. 10/780,447, filed Feb. 13, 2004, which is a continuation-in-part of U.S. patent application Ser. No. 10/427,160, filed Apr. 30, 2003, which is a continuation-in-part of International Patent Application No. PCT/US02/15876 filed May 17, 2002, which claims the benefit of U.S. Provisional Application No. 60/292,217, filed May 18, 2001, U.S. Provisional Application No. 60/362,016, filed Mar. 6, 2002, U.S. Provisional Application No. 60/306,883, filed Jul. 20, 2001, and U.S. Provisional Application No. 60/311,865, filed Aug. 13, 2001. This application is also a continuation-in-part of U.S. patent application Ser. No. 10/727,780 filed Dec. 3, 2003. This application also claims the benefit of U.S. Provisional Application No. 60/543,480, filed Feb. 10, 2004. The instant application claims the benefit of all the listed applications, which are hereby incorporated by reference herein in their entireties, including the drawings.

### FIELD OF THE INVENTION

[0002] The present invention relates to compounds, compositions, and methods for the study, diagnosis, and treatment of traits, diseases and conditions that respond to the modulation of interleukin (IL-1, IL-2, IL-3, IL-4, IL-5, IL-6, IL-7, IL-8, IL-9, IL-10, IL-11, IL-12, IL-13, IL-14, IL-15, IL-16, IL-17, IL-18, IL-19, IL-20, IL-21, IL-22, IL-23, IL-24, IL-25, IL-26, and IL-27) and/or interleukin receptors (IL-1R, IL-2R, IL-3R, IL-4R, IL-5R, IL-6R, IL-7R, IL-8R, IL-9R, IL-10R, IL-11R, IL-12R, IL-13R, IL-14R, IL-15R, IL-16R, IL-17R, IL-18R, IL-19R, IL-20R, IL-21R, IL-22R, IL-23R, IL-24R, IL-25R, IL-26, and IL-27R) gene expression and/or activity. The present invention is also directed to compounds, compositions, and methods relating to traits, diseases and conditions that respond to the modulation of expression and/or activity of genes involved in interleukin and/or interleukin receptor (IL and/or IL-R) gene expression pathways or other cellular processes that mediate the maintenance or development of such traits, diseases and conditions. Specifically, the invention relates to small nucleic acid molecules, such as short interfering nucleic acid (siNA), short interfering RNA (siRNA), double-stranded RNA (dsRNA), micro-RNA (mRNA), and short hairpin RNA (shRNA) molecules capable of mediating RNA interference (RNAi) against interleukin and/or interleukin receptor, such as interleukin-13 and/or interleukin-13 receptor gene expression. Such small nucleic acid molecules are useful, for example, in providing compositions for treatment of traits, diseases and conditions that can respond to modulation of interleukin and/or interleukin receptor expression in a subject, such as cancer, inflammatory, respiratory, autoimmune, cardiovascular, neurological, and/or proliferative diseases, disorders, or conditions.

### BACKGROUND OF THE INVENTION

[0003] The following is a discussion of relevant art pertaining to RNAi. The discussion is provided only for understanding of the invention that follows. The summary is not an admission that any of the work described below is prior art to the claimed invention.

[0004] RNA interference refers to the process of sequence-specific post-transcriptional gene silencing in animals mediated by short interfering RNAs (siRNAs) (Zamore et al., 2000, Cell, 101, 25-33; Fire et al., 1998, Nature, 391, 806; Hamilton et al., 1999, Science, 286, 950-951; Lin et al., 1999, Nature, 402, 128-129; Sharp, 1999, Genes & Dev., 13: 139-141; and Strauss, 1999, Science, 286, 886). The corresponding process in plants (Heifetz et al., International PCT Publication No. WO 99/61631) is commonly referred to as post-transcriptional gene silencing or RNA silencing and is also referred to as quelling in fungi. The process of post-transcriptional gene silencing is thought to be an evolutionarily-conserved cellular defense mechanism used to prevent the expression of foreign genes and is commonly shared by diverse flora and phyla (Fire et al., 1999, Trends Genet., 15, 358). Such protection from foreign gene expression may have evolved in response to the production of double-stranded RNAs (dsRNAs) derived from viral infection or from the random integration of transposon elements into a host genome via a cellular response that specifically destroys homologous single-stranded RNA or viral genomic RNA. The presence of dsRNA in cells triggers the RNAi response through a mechanism that has yet to be fully characterized. This mechanism appears to be different from other known mechanisms involving double stranded RNA-specific ribonucleases, such as the interferon response that results from dsRNA-mediated activation of protein kinase PKR and 2′,5′-oligoadenylate synthetase resulting in non-specific cleavage of mRNA by ribonuclease L (see for example U.S. Pat. Nos. 6,107,094; 5,898,031; Clemens et al., 1997, J. Interferon & Cytokine Res., 17, 503-524; Adah et al., 2001, Curr. Med. Chem., 8, 1189).

[0005] The presence of long dsRNAs in cells stimulates the activity of a ribonuclease III enzyme referred to as dicer (Bass, 2000, Cell, 101, 235; Zamore et al., 2000, Cell, 101, 25-33; Hammond et al., 2000, Nature, 404, 293). Dicer is involved in the processing of the dsRNA into short pieces of dsRNA known as short interfering RNAs (siRNAs) (Zamore et al., 2000, Cell, 101, 25-33; Bass, 2000, Cell, 101, 235; Berstein et al., 2001, Nature, 409, 363). Short interfering RNAs derived from dicer activity are typically about 21 to about 23 nucleotides in length and comprise about 19 base pair duplexes (Zamore et al., 2000, Cell, 101, 25-33; Elbashir et al., 2001, Genes Dev., 15, 188). Dicer has also been implicated in the excision of 21- and 22-nucleotide small temporal RNAs (stRNAs) from precursor RNA of conserved structure that are implicated in translational control (Hutvagner et al., 2001, Science, 293, 834). The RNAi response also features an endonuclease complex, commonly referred to as an RNA-induced silencing complex (RISC), which mediates cleavage of single-stranded RNA having sequence complementary to the antisense strand of the siRNA duplex. Cleavage of the target RNA takes place in the middle of the region complementary to the antisense strand of the siRNA duplex (Elbashir et al., 2001, Genes Dev., 15, 188).

[0006] RNAi has been studied in a variety of systems. Fire et al., 1998, Nature, 391, 806, were the first to observe RNAi in C. elegans. Bahramian and Zarbl, 1999, Molecular and Cellular Biology, 19, 274-283 and Wianny and Goetz, 1999, Nature Cell Biol., 2, 70, describe RNAi mediated by dsRNA in mammalian systems. Hammond et al., 2000, Nature, 404, 293, describe RNAi in Drosophila cells transfected with dsRNA. Elbashir et al., 2001, Nature, 411, 494 and Tuschl et al., International PCT Publication No. WO 01/75164, describe RNAi induced by introduction of duplexes of synthetic 21-nucleotide RNAs in cultured mammalian cells including human embryonic kidney and HeLa cells. Recent work in Drosophila embryonic lysates (Elbashir et al., 2001, EMBO J., 20, 6877 and Tuschl et al., International PCT Publication No. WO 01/75164) has revealed certain requirements for siRNA length, structure, chemical composition, and sequence that are essential to mediate efficient RNAi activity. These studies have shown that 21-nucleotide siRNA duplexes are most active when containing 3′-terminal dinucleotide overhangs. Furthermore, complete substitution of one or both siRNA strands with 2′-deoxy (2′-H) or 2′-O-methyl nucleotides abolishes RNAi activity, whereas substitution of the 3′-terminal siRNA overhang nucleotides with 2′-deoxy nucleotides (2′-H) was shown to be tolerated. Single mismatch sequences in the center of the siRNA duplex were also shown to abolish RNAi activity. In addition, these studies also indicate that the position of the cleavage site in the target RNA is defined by the 5′-end of the siRNA guide sequence rather than the 3′-end of the guide sequence (Elbashir et al., 2001, EMBO J, 20, 6877). Other studies have indicated that a 5′-phosphate on the target-complementary strand of a siRNA duplex is required for siRNA activity and that ATP is utilized to maintain the 5′-phosphate moiety on the siRNA (Nykanen et al., 2001, Cell, 107, 309).

[0007] Studies have shown that replacing the 3′-terminal nucleotide overhanging segments of a 21-mer siRNA duplex having two-nucleotide 3′-overhangs with deoxyribonucleotides does not have an adverse effect on RNAi activity. Replacing up to four nucleotides on each end of the siRNA with deoxyribonucleotides has been reported to be well tolerated, whereas complete substitution with deoxyribonucleotides results in no RNAi activity (Elbashir et al., 2001, EMBO J., 20, 6877 and Tuschl et al., International PCT Publication No. WO 01/75164). In addition, Elbashir et al., supra, also report that substitution of siRNA with 2′-O-methyl nucleotides completely abolishes RNAi activity. Li et al., International PCT Publication No. WO 00/44914, and Beach et al., International PCT Publication No. WO 01/68836 preliminarily suggest that siRNA may include modifications to either the phosphate-sugar backbone or the nucleoside to include at least one of a nitrogen or sulfur heteroatom, however, neither application postulates to what extent such modifications would be tolerated in siRNA molecules, nor provides any further guidance or examples of such modified siRNA. Kreutzer et al., Canadian Patent Application No. 2,359,180, also describe certain chemical modifications for use in dsRNA constructs in order to counteract activation of double-stranded RNA-dependent protein kinase PKR, specifically 2′-amino or 2′-O-methyl nucleotides, and nucleotides containing a 2′-O or 4′-C methylene bridge. However, Kreutzer et al. similarly fails to provide examples or guidance as to what extent these modifications would be tolerated in dsRNA molecules.

[0008] Parrish et al., 2000, Molecular Cell, 6, 1077-1087, tested certain chemical modifications targeting the unc-22 gene in C. elegans using long (>25 nt) siRNA transcripts. The authors describe the introduction of thiophosphate residues into these siRNA transcripts by incorporating thiophosphate nucleotide analogs with T7 and T3 RNA polymerase and observed that RNAs with two phosphorothioate modified bases also had substantial decreases in effectiveness as RNAi. Further, Parrish et al. reported that phosphorothioate modification of more than two residues greatly destabilized the RNAs in vitro such that interference activities could not be assayed. Id. at 1081. The authors also tested certain modifications at the 2′-position of the nucleotide sugar in the long siRNA transcripts and found that substituting deoxynucleotides for ribonucleotides produced a substantial decrease in interference activity, especially in the case of Uridine to Thymidine and/or Cytidine to deoxy-Cytidine substitutions. Id. In addition, the authors tested certain base modifications, including substituting, in sense and antisense strands of the siRNA, 4-thiouracil, 5-bromouracil, 5-iodouracil, and 3-(aminoallyl)uracil for uracil, and inosine for guanosine. Whereas 4-thiouracil and 5-bromouracil substitution appeared to be tolerated, Parrish reported that inosine produced a substantial decrease in interference activity when incorporated in either strand. Parrish also reported that incorporation of 5-iodouracil and 3-(aminoallyl)uracil in the antisense strand resulted in a substantial decrease in RNAi activity as well.

[0009] The use of longer dsRNA has been described. For example, Beach et al., International PCT Publication No. WO 01/68836, describes specific methods for attenuating gene expression using endogenously-derived dsRNA. Tuschl et al., International PCT Publication No. WO 01/75164, describe a Drosophila in vitro RNAi system and the use of specific siRNA molecules for certain functional genomic and certain therapeutic applications; although Tuschl, 2001, Chem. Biochem., 2, 239-245, doubts that RNAi can be used to cure genetic diseases or viral infection due to the danger of activating interferon response. Li et al., International PCT Publication No. WO 00/44914, describe the use of specific long (141 bp-488 bp) enzymatically synthesized or vector expressed dsRNAs for attenuating the expression of certain target genes. Zernicka-Goetz et al., International PCT Publication No. WO 01/36646, describe certain methods for inhibiting the expression of particular genes in mammalian cells using certain long (550 bp-714 bp), enzymatically synthesized or vector expressed dsRNA molecules. Fire et al., International PCT Publication No. WO 99/32619, describe particular methods for introducing certain long dsRNA molecules into cells for use in inhibiting gene expression in nematodes. Plaetinck et al., International PCT Publication No. WO 00/01846, describe certain methods for identifying specific genes responsible for conferring a particular phenotype in a cell using specific long dsRNA molecules. Mello et al., International PCT Publication No. WO 01/29058, describe the identification of specific genes involved in dsRNA-mediated RNAi. Pachuck et al., International PCT Publication No. WO 00/63364, describe certain long (at least 200 nucleotide) dsRNA constructs. Deschamps Depaillette et al., International PCT Publication No. WO 99/07409, describe specific compositions consisting of particular dsRNA molecules combined with certain anti-viral agents. Waterhouse et al., International PCT Publication No. 99/53050 and 1998, PNAS, 95, 13959-13964, describe certain methods for decreasing the phenotypic expression of a nucleic acid in plant cells using certain dsRNAs. Driscoll et al., International PCT Publication No. WO 01/49844, describe specific DNA expression constructs for use in facilitating gene silencing in targeted organisms.

[0010] Others have reported on various RNAi and gene-silencing systems. For example, Parrish et al., 2000, Molecular Cell, 6, 1077-1087, describe specific chemically-modified dsRNA constructs targeting the unc-22 gene of C. elegans. Grossniklaus, International PCT Publication No. WO 01/38551, describes certain methods for regulating polycomb gene expression in plants using certain dsRNAs. Churikov et al., International PCT Publication No. WO 01/42443, describe certain methods for modifying genetic characteristics of an organism using certain dsRNAs. Cogoni et al, International PCT Publication No. WO 01/53475, describe certain methods for isolating a Neurospora silencing gene and uses thereof. Reed et al., International PCT Publication No. WO 01/68836, describe certain methods for gene silencing in plants. Honer et al., International PCT Publication No. WO 01/70944, describe certain methods of drug screening using transgenic nematodes as Parkinson's Disease models using certain dsRNAs. Deak et al., International PCT Publication No. WO 01/72774, describe certain Drosophila-derived gene products that may be related to RNAi in Drosophila. Arndt et al., International PCT Publication No. WO 01/92513 describe certain methods for mediating gene suppression by using factors that enhance RNAi. Tuschl et al., International PCT Publication No. WO 02/44321, describe certain synthetic siRNA constructs. Pachuk et al., International PCT Publication No. WO 00/63364, and Satishchandran et al., International PCT Publication No. WO 01/04313, describe certain methods and compositions for inhibiting the function of certain polynucleotide sequences using certain long (over 250 bp), vector expressed dsRNAs. Echeverri et al., International PCT Publication No. WO 02/38805, describe certain C. elegans genes identified via RNAi. Kreutzer et al., International PCT Publications Nos. WO 02/055692, WO 02/055693, and EP 1144623 B1 describes certain methods for inhibiting gene expression using dsRNA. Graham et al., International PCT Publications Nos. WO 99/49029 and WO 01/70949, and AU 4037501 describe certain vector expressed siRNA molecules. Fire et al., U.S. Pat. No. 6,506,559, describe certain methods for inhibiting gene expression in vitro using certain long dsRNA (299 bp-1033 bp) constructs that mediate RNAi. Martinez et al., 2002, Cell, 110, 563-574, describe certain single stranded siRNA constructs, including certain 5′-phosphorylated single stranded siRNAs that mediate RNA interference in Hela cells. Harborth et al., 2003, Antisense & Nucleic Acid Drug Development, 13, 83-105, describe certain chemically and structurally modified siRNA molecules. Chiu and Rana, 2003, RNA, 9, 1034-1048, describe certain chemically and structurally modified siRNA molecules. Woolf et al., International PCT Publication Nos. WO 03/064626 and WO 03/064625 describe certain chemically modified dsRNA constructs.

### SUMMARY OF THE INVENTION

[0011] This invention relates to compounds, compositions, and methods useful for modulating interleukins (e.g., IL-1-IL-27) and/or interleukin receptor (e.g., IL-1R-IL-27R) gene expression using short interfering nucleic acid (siNA) molecules. This invention also relates to compounds, compositions, and methods useful for modulating the expression and activity of other genes involved in pathways of interleukin and/or interleukin receptor gene expression and/or activity by RNA interference (RNAi) using small nucleic acid molecules. In particular, the instant invention features small nucleic acid molecules, such as short interfering nucleic acid (siNA), short interfering RNA (siRNA), double-stranded RNA (dsRNA), micro-RNA (mRNA), and short hairpin RNA (shRNA) molecules and methods used to modulate the expression of interleukin and/or interleukin receptor (e.g., IL-1-IL-27 and/or IL-1R-IL-27R) genes.

[0012] A siNA of the invention can be unmodified or chemically-modified. A siNA of the instant invention can be chemically synthesized, expressed from a vector or enzymatically synthesized. The instant invention also features various chemically-modified synthetic short interfering nucleic acid (siNA) molecules capable of modulating interleukin and/or interleukin receptor gene expression or activity in cells by RNA interference (RNAi). The use of chemically-modified siNA improves various properties of native siNA molecules through increased resistance to nuclease degradation in vivo and/or through improved cellular uptake. Further, contrary to earlier published studies, siNA having multiple chemical modifications retains its RNAi activity. The siNA molecules of the instant invention provide useful reagents and methods for a variety of therapeutic, veterinary, diagnostic, target validation, genomic discovery, genetic engineering, and pharmacogenomic applications.

[0013] In one embodiment, the invention features one or more siNA molecules and methods that independently or in combination modulate the expression of interleukin and/or interleukin receptor genes encoding proteins, such as proteins comprising interleukins (e.g., IL-1, IL-2, IL-3, IL-4, IL-5, IL-6, IL-7, IL-8, IL-9, IL-10, IL-11, IL-12, IL-13, IL-14, IL-15, IL-16, IL-17, IL-18, IL-19, IL-20, IL-21, IL-22, IL-23, IL-24, IL-25, IL-26, and IL-27) and/or interleukin receptors (e.g., IL-1R, IL-2R, IL-3R, IL-4R, IL-5R, IL-6R, IL-7R, IL-8R, IL-9R, IL-10R, IL-11R, IL-12R, IL-13R, IL-14R, IL-15R, IL-16R, IL-17R, IL-18R, IL-19R, IL-20R, IL-21R, IL-22R, IL-23R, IL-24R, IL-25R, IL-26, and IL-27R) associated with the maintenance and/or development of cancer, inflammatory, respiratory, autoimmune, cardiovascular, neurological, and/or proliferative diseases, traits, conditions and disorders, such as genes encoding sequences comprising those sequences referred to by GenBank Accession Nos. shown in Table I, referred to herein generally as interleukin and/or interleukin receptor. The description below of the various aspects and embodiments of the invention is provided with reference to exemplary interleukin and/or interleukin receptor genes referred to herein as interleukin and/or interleukin receptor. However, the various aspects and embodiments are also directed to other interleukin and/or interleukin receptor genes, such as homolog genes and transcript variants, and polymorphisms (e.g., single nucleotide polymorphism, (SNPs)) associated with certain interleukin and/or interleukin receptor genes. As such, the various aspects and embodiments are also directed to other genes that are involved in interleukin and/or interleukin receptor mediated pathways of signal transduction or gene expression that are involved, for example, in the the maintenence or development of diseases, traits, or conditions described herein. These additional genes can be analyzed for target sites using the methods described for interleukin and/or interleukin receptor genes herein. Thus, the modulation of other genes and the effects of such modulation of the other genes can be performed, determined, and measured as described herein.

[0014] In one embodiment, the invention features a double-stranded short interfering nucleic acid (siNA) molecule that down-regulates expression of an interleukin and/or interleukin receptor gene, wherein said siNA molecule comprises about 15 to about 28 base pairs.

[0015] In one embodiment, the invention features a double stranded short interfering nucleic acid (siNA) molecule that directs cleavage of an interleukin and/or interleukin receptor RNA via RNA interference (RNAi), wherein the double stranded siNA molecule comprises a first and a second strand, each strand of the siNA molecule is about 18 to about 28 nucleotides in length, the first strand of the siNA molecule comprises nucleotide sequence having sufficient complementarity to the interleukin and/or interleukin receptor RNA for the siNA molecule to direct cleavage of the interleukin and/or interleukin receptor RNA via RNA interference, and the second strand of said siNA molecule comprises nucleotide sequence that is complementary to the first strand.

[0016] In one embodiment, the invention features a double stranded short interfering nucleic acid (siNA) molecule that directs cleavage of an interleukin and/or interleukin receptor RNA via RNA interference (RNAi), wherein the double stranded siNA molecule comprises a first and a second strand, each strand of the siNA molecule is about 18 to about 23 nucleotides in length, the first strand of the siNA molecule comprises nucleotide sequence having sufficient complementarity to the interleukin and/or interleukin receptor RNA for the siNA molecule to direct cleavage of the interleukin and/or interleukin receptor RNA via RNA interference, and the second strand of said siNA molecule comprises nucleotide sequence that is complementary to the first strand.

[0017] In one embodiment, the invention features a chemically synthesized double stranded short interfering nucleic acid (siNA) molecule that directs cleavage of an interleukin and/or interleukin receptor RNA via RNA interference (RNAi), wherein each strand of the siNA molecule is about 18 to about 28 nucleotides in length; and one strand of the siNA molecule comprises nucleotide sequence having sufficient complementarity to the interleukin and/or interleukin receptor RNA for the siNA molecule to direct cleavage of the interleukin and/or interleukin receptor RNA via RNA interference.

[0018] In one embodiment, the invention features a chemically synthesized double stranded short interfering nucleic acid (siNA) molecule that directs cleavage of an interleukin and/or interleukin receptor RNA via RNA interference (RNAi), wherein each strand of the siNA molecule is about 18 to about 23 nucleotides in length; and one strand of the siNA molecule comprises nucleotide sequence having sufficient complementarity to the interleukin and/or interleukin receptor RNA for the siNA molecule to direct cleavage of the interleukin and/or interleukin receptor RNA via RNA interference.

[0019] In one embodiment, the invention features a siNA molecule that down-regulates expression of an interleukin and/or interleukin receptor gene, for example, wherein the interleukin and/or interleukin receptor gene comprises interleukin and/or interleukin receptor encoding sequence. In one embodiment, the invention features a siNA molecule that down-regulates expression of an interleukin and/or interleukin receptor gene, for example, wherein the interleukin and/or interleukin receptor gene comprises interleukin and/or interleukin receptor non-coding sequence or regulatory elements involved in interleukin and/or interleukin receptor gene expression.

[0020] In one embodiment, a siNA of the invention is used to inhibit the expression of interleukin and/or interleukin receptor genes or an interleukin and/or interleukin receptor gene family (e.g., interleukin and/or interleukin receptor superfamily genes), wherein the genes or gene family sequences share sequence homology. Such homologous sequences can be identified as is known in the art, for example using sequence alignments. siNA molecules can be designed to target such homologous sequences, for example using perfectly complementary sequences or by incorporating non-canonical base pairs, for example mismatches and/or wobble base pairs, that can provide additional target sequences. In instances where mismatches are identified, non-canonical base pairs (for example, mismatches and/or wobble bases) can be used to generate siNA molecules that target more than one gene sequence. In a non-limiting example, non-canonical base pairs such as UU and CC base pairs are used to generate siNA molecules that are capable of targeting sequences for differing interleukin and/or interleukin receptor targets that share sequence homology. As such, one advantage of using siNAs of the invention is that a single siNA can be designed to include nucleic acid sequence that is complementary to the nucleotide sequence that is conserved between the homologous genes. In this approach, a single siNA can be used to inhibit expression of more than one gene instead of using more than one siNA molecule to target the different genes.

[0021] In one embodiment, the invention features a siNA molecule having RNAi activity against interleukin and/or interleukin receptor RNA, wherein the siNA molecule comprises a sequence complementary to any RNA having interleukin and/or interleukin receptor encoding sequence, such as those sequences having GenBank Accession Nos. shown in Table I. In another embodiment, the invention features a siNA molecule having RNAi activity against interleukin and/or interleukin receptor RNA, wherein the siNA molecule comprises a sequence complementary to an RNA having variant interleukin and/or interleukin receptor encoding sequence, for example other mutant interleukin and/or interleukin receptor genes not shown in Table I but known in the art to be associated with the maintenance and/or development of cancer, inflammatory, respiratory, autoimmune, cardiovascular, neurological, and/or proliferative diseases, disorders, and/or conditions. Chemical modifications as shown in Tables III and IV or otherwise described herein can be applied to any siNA construct of the invention. In another embodiment, a siNA molecule of the invention includes a nucleotide sequence that can interact with nucleotide sequence of an interleukin and/or interleukin receptor gene and thereby mediate silencing of interleukin and/or interleukin receptor gene expression, for example, wherein the siNA mediates regulation of interleukin and/or interleukin receptor gene expression by cellular processes that modulate the chromatin structure or methylation patterns of the interleukin and/or interleukin receptor gene and prevent transcription of the interleukin and/or interleukin receptor gene.

[0022] In one embodiment, siNA molecules of the invention are used to down regulate or inhibit the expression of interleukin and/or interleukin receptor proteins arising from interleukin and/or interleukin receptor haplotype polymorphisms that are associated with a disease or condition, (e.g., cancer, inflammatory, respiratory, autoimmune, cardiovascular, neurological, and/or proliferative diseases, disorders, and/or conditions). Analysis of interleukin and/or interleukin receptor genes, or interleukin and/or interleukin receptor protein or RNA levels can be used to identify subjects with such polymorphisms or those subjects who are at risk of developing traits, conditions, or diseases described herein. These subjects are amenable to treatment, for example, treatment with siNA molecules of the invention and any other composition useful in treating diseases related to interleukin and/or interleukin receptor gene expression. As such, analysis of interleukin and/or interleukin receptor protein or RNA levels can be used to determine treatment type and the course of therapy in treating a subject. Monitoring of interleukin and/or interleukin receptor protein or RNA levels can be used to predict treatment outcome and to determine the efficacy of compounds and compositions that modulate the level and/or activity of certain interleukin and/or interleukin receptor proteins associated with a trait, condition, or disease.

[0023] In one embodiment of the invention a siNA molecule comprises an antisense strand comprising a nucleotide sequence that is complementary to a nucleotide sequence or a portion thereof encoding a interleukin and/or interleukin receptor protein. The siNA further comprises a sense strand, wherein said sense strand comprises a nucleotide sequence of a interleukin and/or interleukin receptor gene or a portion thereof.

[0024] In another embodiment, a siNA molecule comprises an antisense region comprising a nucleotide sequence that is complementary to a nucleotide sequence encoding an interleukin and/or interleukin receptor protein or a portion thereof. The siNA molecule further comprises a sense region, wherein said sense region comprises a nucleotide sequence of an interleukin and/or interleukin receptor gene or a portion thereof.

[0025] In another embodiment, the invention features a siNA molecule comprising a nucleotide sequence in the antisense region of the siNA molecule that is complementary to a nucleotide sequence or portion of sequence of an interleukin and/or interleukin receptor gene. In another embodiment, the invention features a siNA molecule comprising a region, for example, the antisense region of the siNA construct, complementary to a sequence comprising an interleukin and/or interleukin receptor gene sequence or a portion thereof.

[0026] In one embodiment, the antisense region of interleukin receptor siNA constructs comprises a sequence complementary to sequence having any of SEQ ID NOs. 1-81, 265-464, 807-1029, 1253-1260, 1277-1284, 1303-1310, 1311-1318, 1327-1334, 1343-1350, 1359-1366, 1375-1382, 1503-1510, 1519-1526, 1535-1542, 1551-1558, 1567-1574, 1715-1722, 1731-1738, 1747-1754, 1763-1770, 1779-1786, 1811, 1813, 1815, 1817, 1818, 1820, 1822, 1824, 1826, or 1827. In one embodiment, the antisense region of interleukin receptor constructs comprises sequence having any of SEQ ID NOs. 82-162, 465-664, 1030-1252, 1319-1326, 1335-1342, 1351-1358, 1367-1374, 1383-1406, 1511-1518, 1527-1534, 1543-1550, 1559-1566, 1575-1598, 1723-1730, 1739-1746, 1755-1762, 1771-1778, 1787-1810, 1812, 1814, 1816, 1819, 1821, 1823, 1825, or 1828. In another embodiment, the sense region of interleukin receptor constructs comprises sequence having any of SEQ ID NOs. 1-81, 265-464, 807-1029, 1253-1260, 1277-1284, 1303-1310, 1311-1318, 1327-1334, 1343-1350, 1359-1366, 1375-1382, 1503-1510, 1519-1526, 1535-1542, 1551-1558, 1567-1574, 1715-1722, 1731-1738, 1747-1754, 1763-1770, 1779-1786, 1811, 1813, 1815, 1817, 1818, 1820, 1822, 1824, 1826, or 1827.

[0027] In one embodiment, the antisense region of interleukin siNA constructs comprises a sequence complementary to sequence having any of SEQ ID NOs. 163-213, 665-735, 1269-1276, 1285-1302, 1407-1414, 1423-1430, 1439-1446, 1455-1462, 1471-1478, 1599-1606, 1615-1622, 1631-1648, 1657-1664, 1683-1690, 1811, 1813, 1815, 1817, or 1818. In one embodiment, the antisense region of interleukin receptor constructs comprises sequence having any of SEQ ID NOs. 214-264, 736-806, 1415-1422, 1431-1438, 1447-1454, 1463-1470, 1479-1502, 1607-1614, 1623-1630, 1649-1656, 1665-1682, 1691-1714, 1812, 1814, 1816, or 1819. In another embodiment, the sense region of interleukin receptor constructs comprises sequence having any of SEQ ID NOs. 163-213, 665-735, 1269-1276, 1285-1302, 1407-1414, 1423-1430, 1439-1446, 1455-1462, 1471-1478, 1599-1606, 1615-1622, 1631-1648, 1657-1664, 1683-1690, 1811, 1813, 1815, 1817, or 1818.

[0028] In one embodiment, a siNA molecule of the invention comprises any of SEQ ID NOs: 1-1828. The sequences shown in SEQ ID NOs: 1-1828 are not limiting. A siNA molecule of the invention can comprise any contiguous interleukin and/or interleukin receptor sequence (e.g., about 15 to about 25 or more, or about 15, 16, 17, 18, 19, 20, 21, 22, 23, 24, or 25 or more contiguous interleukin and/or interleukin receptor nucleotides).

[0029] In yet another embodiment, the invention features a siNA molecule comprising a sequence, for example, the antisense sequence of the siNA construct, complementary to a sequence or portion of sequence comprising sequence represented by GenBank Accession Nos. shown in Table I. Chemical modifications in Tables III and IV and described herein can be applied to any siNA construct of the invention.

[0030] In one embodiment of the invention a siNA molecule comprises an antisense strand having about 15 to about 30 (e.g., about 15, 16, 17, 18, 19, 20, 21, 22, 23, 24, 25, 26, 27, 28, 29, or 30) nucleotides, wherein the antisense strand is complementary to a RNA sequence or a portion thereof encoding a interleukin and/or interleukin receptor protein, and wherein said siNA further comprises a sense strand having about 15 to about 30 (e.g., about 15, 16, 17, 18, 19, 20, 21, 22, 23, 24, 25, 26, 27, 28, 29, or 30) nucleotides, and wherein said sense strand and said antisense strand are distinct nucleotide sequences where at least about 15 nucleotides in each strand are complementary to the other strand.

[0031] In another embodiment of the invention a siNA molecule of the invention comprises an antisense region having about 15 to about 30 (e.g., about 15, 16, 17, 18, 19, 20, 21, 22, 23, 24, 25, 26, 27, 28, 29, or 30) nucleotides, wherein the antisense region is complementary to a RNA sequence encoding a interleukin and/or interleukin receptor protein, and wherein said siNA further comprises a sense region having about 15 to about 30 (e.g., about 15, 16, 17, 18, 19, 20, 21, 22, 23, 24, 25, 26, 27, 28, 29, or 30) nucleotides, wherein said sense region and said antisense region are comprised in a linear molecule where the sense region comprises at least about 15 nucleotides that are complementary to the antisense region.

[0032] In one embodiment, a siNA molecule of the invention has RNAi activity that modulates expression of RNA encoded by an interleukin and/or interleukin receptor gene. Because interleukin and/or interleukin receptor (e.g., interleukin and/or interleukin receptor superfamily) genes can share some degree of sequence homology with each other, siNA molecules can be designed to target a class of interleukin and/or interleukin receptor genes or alternately specific interleukin and/or interleukin receptor genes (e.g., polymorphic variants) by selecting sequences that are either shared amongst different interleukin and/or interleukin receptor targets or alternatively that are unique for a specific interleukin and/or interleukin receptor target. Therefore, in one embodiment, the siNA molecule can be designed to target conserved regions of interleukin and/or interleukin receptor RNA sequences having homology among several interleukin and/or interleukin receptor gene variants so as to target a class of interleukin and/or interleukin receptor genes with one siNA molecule. Accordingly, in one embodiment, the siNA molecule of the invention modulates the expression of one or both interleukin and/or interleukin receptor alleles in a subject. In another embodiment, the siNA molecule can be designed to target a sequence that is unique to a specific interleukin and/or interleukin receptor RNA sequence (e.g., a single interleukin and/or interleukin receptor allele or interleukin and/or interleukin receptor single nucleotide polymorphism (SNP)) due to the high degree of specificity that the siNA molecule requires to mediate RNAi activity.

[0033] In one embodiment, nucleic acid molecules of the invention that act as mediators of the RNA interference gene silencing response are double-stranded nucleic acid molecules. In another embodiment, the siNA molecules of the invention consist of duplex nucleic acid molecules containing about 15 to about 30 base pairs between oligonucleotides comprising about 15 to about 30 (e.g., about 15, 16, 17, 18, 19, 20, 21, 22, 23, 24, 25, 26, 27, 28, 29, or 30) nucleotides. In yet another embodiment, siNA molecules of the invention comprise duplex nucleic acid molecules with overhanging ends of about 1 to about 3 (e.g., about 1, 2, or 3) nucleotides, for example, about 21-nucleotide duplexes with about 19 base pairs and 3′-terminal mononucleotide, dinucleotide, or trinucleotide overhangs. In yet another embodiment, siNA molecules of the invention comprise duplex nucleic acid molecules with blunt ends, where both ends are blunt, or alternatively, where one of the ends is blunt.

[0034] In one embodiment, the invention features one or more chemically-modified siNA constructs having specificity for interleukin and/or interleukin receptor expressing nucleic acid molecules, such as RNA encoding an interleukin and/or interleukin receptor protein. In one embodiment, the invention features a RNA based siNA molecule (e.g., a siNA comprising 2′-OH nucleotides) having specificity for interleukin and/or interleukin receptor expressing nucleic acid molecules that includes one or more chemical modifications described herein. Non-limiting examples of such chemical modifications include without limitation phosphorothioate internucleotide linkages, 2′-deoxyribonucleotides, 2′-O-methyl ribonucleotides, 2′-deoxy-2′-fluoro ribonucleotides, “universal base” nucleotides, “acyclic” nucleotides, 5-C-methyl nucleotides, and terminal glyceryl and/or inverted deoxy abasic residue incorporation. These chemical modifications, when used in various siNA constructs, (e.g., RNA based siNA constructs), are shown to preserve RNAi activity in cells while at the same time, dramatically increasing the serum stability of these compounds. Furthermore, contrary to the data published by Parrish et al., supra, applicant demonstrates that multiple (greater than one) phosphorothioate substitutions are well-tolerated and confer substantial increases in serum stability for modified siNA constructs.

[0035] In one embodiment, a siNA molecule of the invention comprises modified nucleotides while maintaining the ability to mediate RNAi. The modified nucleotides can be used to improve in vitro or in vivo characteristics such as stability, activity, and/or bioavailability. For example, a siNA molecule of the invention can comprise modified nucleotides as a percentage of the total number of nucleotides present in the siNA molecule. As such, a siNA molecule of the invention can generally comprise about 5% to about 100% modified nucleotides (e.g., about 5%, 10%, 15%, 20%, 25%, 30%, 35%, 40%, 45%, 50%, 55%, 60%, 65%, 70%, 75%, 80%, 85%, 90%, 95% or 100% modified nucleotides). The actual percentage of modified nucleotides present in a given siNA molecule will depend on the total number of nucleotides present in the siNA. If the siNA molecule is single stranded, the percent modification can be based upon the total number of nucleotides present in the single stranded siNA molecules. Likewise, if the siNA molecule is double stranded, the percent modification can be based upon the total number of nucleotides present in the sense strand, antisense strand, or both the sense and antisense strands.

[0036] One aspect of the invention features a double-stranded short interfering nucleic acid (siNA) molecule that down-regulates expression of an interleukin and/or interleukin receptor gene. In one embodiment, the double stranded siNA molecule comprises one or more chemical modifications and each strand of the double-stranded siNA is about 21 nucleotides long. In one embodiment, the double-stranded siNA molecule does not contain any ribonucleotides. In another embodiment, the double-stranded siNA molecule comprises one or more ribonucleotides. In one embodiment, each strand of the double-stranded siNA molecule independently comprises about 15 to about 30 (e.g., about 15, 16, 17, 18, 19, 20, 21, 22, 23, 24, 25, 26, 27, 28, 29, or 30) nucleotides, wherein each strand comprises about 15 to about 30 (e.g., about 15, 16, 17, 18, 19, 20, 21, 22, 23, 24, 25, 26, 27, 28, 29, or 30) nucleotides that are complementary to the nucleotides of the other strand. In one embodiment, one of the strands of the double-stranded siNA molecule comprises a nucleotide sequence that is complementary to a nucleotide sequence or a portion thereof of the interleukin and/or interleukin receptor gene, and the second strand of the double-stranded siNA molecule comprises a nucleotide sequence substantially similar to the nucleotide sequence of the interleukin and/or interleukin receptor gene or a portion thereof.

[0037] In another embodiment, the invention features a double-stranded short interfering nucleic acid (siNA) molecule that down-regulates expression of an interleukin and/or interleukin receptor gene comprising an antisense region, wherein the antisense region comprises a nucleotide sequence that is complementary to a nucleotide sequence of the interleukin and/or interleukin receptor gene or a portion thereof, and a sense region, wherein the sense region comprises a nucleotide sequence substantially similar to the nucleotide sequence of the interleukin and/or interleukin receptor gene or a portion thereof. In one embodiment, the antisense region and the sense region independently comprise about 15 to about 30 (e.g. about 15, 16, 17, 18, 19, 20, 21, 22, 23, 24, 25, 26, 27, 28, 29, or 30) nucleotides, wherein the antisense region comprises about 15 to about 30 (e.g. about 15, 16, 17, 18, 19, 20, 21, 22, 23, 24, 25, 26, 27, 28, 29, or 30) nucleotides that are complementary to nucleotides of the sense region.

[0038] In another embodiment, the invention features a double-stranded short interfering nucleic acid (siNA) molecule that down-regulates expression of an interleukin and/or interleukin receptor gene comprising a sense region and an antisense region, wherein the antisense region comprises a nucleotide sequence that is complementary to a nucleotide sequence of RNA encoded by the interleukin and/or interleukin receptor gene or a portion thereof and the sense region comprises a nucleotide sequence that is complementary to the antisense region.

[0039] In one embodiment, a siNA molecule of the invention comprises blunt ends, i.e., ends that do not include any overhanging nucleotides. For example, a siNA molecule comprising modifications described herein (e.g., comprising nucleotides having Formulae I-VII or siNA constructs comprising “Stab 00”-“Stab 32” (Table IV) or any combination thereof (see Table IV)) and/or any length described herein can comprise blunt ends or ends with no overhanging nucleotides.

[0040] In one embodiment, any siNA molecule of the invention can comprise one or more blunt ends, i.e. where a blunt end does not have any overhanging nucleotides. In one embodiment, the blunt ended siNA molecule has a number of base pairs equal to the number of nucleotides present in each strand of the siNA molecule. In another embodiment, the siNA molecule comprises one blunt end, for example wherein the 5′-end of the antisense strand and the 3′-end of the sense strand do not have any overhanging nucleotides. In another example, the siNA molecule comprises one blunt end, for example wherein the 3′-end of the antisense strand and the 5′-end of the sense strand do not have any overhanging nucleotides. In another example, a siNA molecule comprises two blunt ends, for example wherein the 3′-end of the antisense strand and the 5′-end of the sense strand as well as the 5′-end of the antisense strand and 3′-end of the sense strand do not have any overhanging nucleotides. A blunt ended siNA molecule can comprise, for example, from about 15 to about 30 nucleotides (e.g., about 15, 16, 17, 18, 19, 20, 21, 22, 23, 24, 25, 26, 27, 28, 29, or 30 nucleotides). Other nucleotides present in a blunt ended siNA molecule can comprise, for example, mismatches, bulges, loops, or wobble base pairs to modulate the activity of the siNA molecule to mediate RNA interference.

[0041] By “blunt ends” is meant symmetric termini or termini of a double stranded siNA molecule having no overhanging nucleotides. The two strands of a double stranded siNA molecule align with each other without over-hanging nucleotides at the termini. For example, a blunt ended siNA construct comprises terminal nucleotides that are complementary between the sense and antisense regions of the siNA molecule.

[0042] In one embodiment, the invention features a double-stranded short interfering nucleic acid (siNA) molecule that down-regulates expression of an interleukin and/or interleukin receptor gene, wherein the siNA molecule is assembled from two separate oligonucleotide fragments wherein one fragment comprises the sense region and the second fragment comprises the antisense region of the siNA molecule. The sense region can be connected to the antisense region via a linker molecule, such as a polynucleotide linker or a non-nucleotide linker.

[0043] In one embodiment, the invention features double-stranded short interfering nucleic acid (siNA) molecule that down-regulates expression of an interleukin and/or interleukin receptor gene, wherein the siNA molecule comprises about 15 to about 30 (e.g. about 15, 16, 17, 18, 19, 20, 21, 22, 23, 24, 25, 26, 27, 28, 29, or 30) base pairs, and wherein each strand of the siNA molecule comprises one or more chemical modifications. In another embodiment, one of the strands of the double-stranded siNA molecule comprises a nucleotide sequence that is complementary to a nucleotide sequence of an interleukin and/or interleukin receptor gene or a portion thereof, and the second strand of the double-stranded siNA molecule comprises a nucleotide sequence substantially similar to the nucleotide sequence or a portion thereof of the interleukin and/or interleukin receptor gene. In another embodiment, one of the strands of the double-stranded siNA molecule comprises a nucleotide sequence that is complementary to a nucleotide sequence of an interleukin and/or interleukin receptor gene or portion thereof, and the second strand of the double-stranded siNA molecule comprises a nucleotide sequence substantially similar to the nucleotide sequence or portion thereof of the interleukin and/or interleukin receptor gene. In another embodiment, each strand of the siNA molecule comprises about 15 to about 30 (e.g. about 15, 16, 17, 18, 19, 20, 21, 22, 23, 24, 25, 26, 27, 28, 29, or 30) nucleotides, and each strand comprises at least about 15 to about 30 (e.g. about 15, 16, 17, 18, 19, 20, 21, 22, 23, 24, 25, 26, 27, 28, 29, or 30) nucleotides that are complementary to the nucleotides of the other strand. The interleukin and/or interleukin receptor gene can comprise, for example, sequences referred to in Table I.

[0044] In one embodiment, a siNA molecule of the invention comprises no ribonucleotides. In another embodiment, a siNA molecule of the invention comprises ribonucleotides.

[0045] In one embodiment, a siNA molecule of the invention comprises an antisense region comprising a nucleotide sequence that is complementary to a nucleotide sequence of an interleukin and/or interleukin receptor gene or a portion thereof, and the siNA further comprises a sense region comprising a nucleotide sequence substantially similar to the nucleotide sequence of the interleukin and/or interleukin receptor gene or a portion thereof. In another embodiment, the antisense region and the sense region each comprise about 15 to about 30 (e.g. about 15, 16, 17, 18, 19, 20, 21, 22, 23, 24, 25, 26, 27, 28, 29, or 30) nucleotides and the antisense region comprises at least about 15 to about 30 (e.g. about 15, 16, 17, 18, 19, 20, 21, 22, 23, 24, 25, 26, 27, 28, 29, or 30) nucleotides that are complementary to nucleotides of the sense region. The interleukin and/or interleukin receptor gene can comprise, for example, sequences referred to in Table I. In another embodiment, the siNA is a double stranded nucleic acid molecule, where each of the two strands of the siNA molecule independently comprise about 15 to about 40 (e.g. about 15, 16, 17, 18, 19, 20, 21, 22, 23, 24, 25, 26, 27, 28, 29, 30, 31, 23, 33, 34, 35, 36, 37, 38, 39, or 40) nucleotides, and where one of the strands of the siNA molecule comprises at least about 15 (e.g. about 15, 16, 17, 18, 19, 20, 21, 22, 23, 24 or 25 or more) nucleotides that are complementary to the nucleic acid sequence of the interleukin and/or interleukin receptor gene or a portion thereof.

[0046] In one embodiment, a siNA molecule of the invention comprises a sense region and an antisense region, wherein the antisense region comprises a nucleotide sequence that is complementary to a nucleotide sequence of RNA encoded by an interleukin and/or interleukin receptor gene, or a portion thereof, and the sense region comprises a nucleotide sequence that is complementary to the antisense region. In one embodiment, the siNA molecule is assembled from two separate oligonucleotide fragments, wherein one fragment comprises the sense region and the second fragment comprises the antisense region of the siNA molecule. In another embodiment, the sense region is connected to the antisense region via a linker molecule. In another embodiment, the sense region is connected to the antisense region via a linker molecule, such as a nucleotide or non-nucleotide linker. The interleukin and/or interleukin receptor gene can comprise, for example, sequences referred in to Table I.

[0047] In one embodiment, the invention features a double-stranded short interfering nucleic acid (siNA) molecule that down-regulates expression of an interleukin and/or interleukin receptor gene comprising a sense region and an antisense region, wherein the antisense region comprises a nucleotide sequence that is complementary to a nucleotide sequence of RNA encoded by the interleukin and/or interleukin receptor gene or a portion thereof and the sense region comprises a nucleotide sequence that is complementary to the antisense region, and wherein the siNA molecule has one or more modified pyrimidine and/or purine nucleotides. In one embodiment, the pyrimidine nucleotides in the sense region are 2′-O-methylpyrimidine nucleotides or 2′-deoxy-2′-fluoro pyrimidine nucleotides and the purine nucleotides present in the sense region are 2′-deoxy purine nucleotides. In another embodiment, the pyrimidine nucleotides in the sense region are 2′-deoxy-2′-fluoro pyrimidine nucleotides and the purine nucleotides present in the sense region are 2′-O-methyl purine nucleotides. In another embodiment, the pyrimidine nucleotides in the sense region are 2′-deoxy-2′-fluoro pyrimidine nucleotides and the purine nucleotides present in the sense region are 2′-deoxy purine nucleotides. In one embodiment, the pyrimidine nucleotides in the antisense region are 2′-deoxy-2′-fluoro pyrimidine nucleotides and the purine nucleotides present in the antisense region are 2′-O-methyl or 2′-deoxy purine nucleotides. In another embodiment of any of the above-described siNA molecules, any nucleotides present in a non-complementary region of the sense strand (e.g. overhang region) are 2′-deoxy nucleotides.

[0048] In one embodiment, the invention features a double-stranded short interfering nucleic acid (siNA) molecule that down-regulates expression of an interleukin and/or interleukin receptor gene, wherein the siNA molecule is assembled from two separate oligonucleotide fragments wherein one fragment comprises the sense region and the second fragment comprises the antisense region of the siNA molecule, and wherein the fragment comprising the sense region includes a terminal cap moiety at the 5′-end, the 3′-end, or both of the 5′ and 3′ ends of the fragment. In one embodiment, the terminal cap moiety is an inverted deoxy abasic moiety or glyceryl moiety. In one embodiment, each of the two fragments of the siNA molecule independently comprise about 15 to about 30 (e.g. about 15, 16, 17, 18, 19, 20, 21, 22, 23, 24, 25, 26, 27, 28, 29, or 30) nucleotides. In another embodiment, each of the two fragments of the siNA molecule independently comprise about 15 to about 40 (e.g. about 15, 16, 17, 18, 19, 20, 21, 22, 23, 24, 25, 26, 27, 28, 29, 30, 31, 23, 33, 34, 35, 36, 37, 38, 39, or 40) nucleotides. In a non-limiting example, each of the two fragments of the siNA molecule comprise about 21 nucleotides.

[0049] In one embodiment, the invention features a siNA molecule comprising at least one modified nucleotide, wherein the modified nucleotide is a 2′-deoxy-2′-fluoro nucleotide. The siNA can be, for example, about 15 to about 40 nucleotides in length. In one embodiment, all pyrimidine nucleotides present in the siNA are 2′-deoxy-2′-fluoro pyrimidine nucleotides. In one embodiment, the modified nucleotides in the siNA include at least one 2′-deoxy-2′-fluoro cytidine or 2′-deoxy-2′-fluoro uridine nucleotide. In another embodiment, the modified nucleotides in the siNA include at least one 2′-fluoro cytidine and at least one 2′-deoxy-2′-fluoro uridine nucleotides. In one embodiment, all uridine nucleotides present in the siNA are 2′-deoxy-2′-fluoro uridine nucleotides. In one embodiment, all cytidine nucleotides present in the siNA are 2′-deoxy-2′-fluoro cytidine nucleotides. In one embodiment, all adenosine nucleotides present in the siNA are 2′-deoxy-2′-fluoro adenosine nucleotides. In one embodiment, all guanosine nucleotides present in the siNA are 2′-deoxy-2′-fluoro guanosine nucleotides. The siNA can further comprise at least one modified internucleotidic linkage, such as phosphorothioate linkage. In one embodiment, the 2′-deoxy-2′-fluoronucleotides are present at specifically selected locations in the siNA that are sensitive to cleavage by ribonucleases, such as locations having pyrimidine nucleotides.

[0050] In one embodiment, the invention features a method of increasing the stability of a siNA molecule against cleavage by ribonucleases comprising introducing at least one modified nucleotide into the siNA molecule, wherein the modified nucleotide is a 2′-deoxy-2′-fluoro nucleotide. In one embodiment, all pyrimidine nucleotides present in the siNA are 2′-deoxy-2′-fluoro pyrimidine nucleotides. In one embodiment, the modified nucleotides in the siNA include at least one 2′-deoxy-2′-fluoro cytidine or 2′-deoxy-2′-fluoro uridine nucleotide. In another embodiment, the modified nucleotides in the siNA include at least one 2′-fluoro cytidine and at least one 2′-deoxy-2′-fluoro uridine nucleotides. In one embodiment, all uridine nucleotides present in the siNA are 2′-deoxy-2′-fluoro uridine nucleotides. In one embodiment, all cytidine nucleotides present in the siNA are 2′-deoxy-2′-fluoro cytidine nucleotides. In one embodiment, all adenosine nucleotides present in the siNA are 2′-deoxy-2′-fluoro adenosine nucleotides. In one embodiment, all guanosine nucleotides present in the siNA are 2′-deoxy-2′-fluoro guanosine nucleotides. The siNA can further comprise at least one modified internucleotidic linkage, such as phosphorothioate linkage. In one embodiment, the 2′-deoxy-2′-fluoronucleotides are present at specifically selected locations in the siNA that are sensitive to cleavage by ribonucleases, such as locations having pyrimidine nucleotides.

[0051] In one embodiment, the invention features a double-stranded short interfering nucleic acid (siNA) molecule that down-regulates expression of an interleukin and/or interleukin receptor gene comprising a sense region and an antisense region, wherein the antisense region comprises a nucleotide sequence that is complementary to a nucleotide sequence of RNA encoded by the interleukin and/or interleukin receptor gene or a portion thereof and the sense region comprises a nucleotide sequence that is complementary to the antisense region, and wherein the purine nucleotides present in the antisense region comprise 2′-deoxy-purine nucleotides. In an alternative embodiment, the purine nucleotides present in the antisense region comprise 2′-O-methyl purine nucleotides. In either of the above embodiments, the antisense region can comprise a phosphorothioate internucleotide linkage at the 3′ end of the antisense region. Alternatively, in either of the above embodiments, the antisense region can comprise a glyceryl modification at the 3′ end of the antisense region. In another embodiment of any of the above-described siNA molecules, any nucleotides present in a non-complementary region of the antisense strand (e.g. overhang region) are 2′-deoxy nucleotides.

[0052] In one embodiment, the antisense region of a siNA molecule of the invention comprises sequence complementary to a portion of an interleukin and/or interleukin receptor transcript having sequence unique to a particular interleukin and/or interleukin receptor disease related allele, such as sequence comprising a single nucleotide polymorphism (SNP) associated with the disease specific allele. As such, the antisense region of a siNA molecule of the invention can comprise sequence complementary to sequences that are unique to a particular allele to provide specificity in mediating selective RNAi against the disease, condition, or trait related allele.

[0053] In one embodiment, the invention features a double-stranded short interfering nucleic acid (siNA) molecule that down-regulates expression of an interleukin and/or interleukin receptor gene, wherein the siNA molecule is assembled from two separate oligonucleotide fragments wherein one fragment comprises the sense region and the second fragment comprises the antisense region of the siNA molecule. In another embodiment, the siNA molecule is a double stranded nucleic acid molecule, where each strand is about 21 nucleotides long and where about 19 nucleotides of each fragment of the siNA molecule are base-paired to the complementary nucleotides of the other fragment of the siNA molecule, wherein at least two 3′ terminal nucleotides of each fragment of the siNA molecule are not base-paired to the nucleotides of the other fragment of the siNA molecule. In another embodiment, the siNA molecule is a double stranded nucleic acid molecule, where each strand is about 19 nucleotide long and where the nucleotides of each fragment of the siNA molecule are base-paired to the complementary nucleotides of the other fragment of the siNA molecule to form at least about 15 (e.g., 15, 16, 17, 18, or 19) base pairs, wherein one or both ends of the siNA molecule are blunt ends. In one embodiment, each of the two 3′ terminal nucleotides of each fragment of the siNA molecule is a 2′-deoxy-pyrimidine nucleotide, such as a 2′-deoxy-thymidine. In another embodiment, all nucleotides of each fragment of the siNA molecule are base-paired to the complementary nucleotides of the other fragment of the siNA molecule. In another embodiment, the siNA molecule is a double stranded nucleic acid molecule of about 19 to about 25 base pairs having a sense region and an antisense region, where about 19 nucleotides of the antisense region are base-paired to the nucleotide sequence or a portion thereof of the RNA encoded by the interleukin and/or interleukin receptor gene. In another embodiment, about 21 nucleotides of the antisense region are base-paired to the nucleotide sequence or a portion thereof of the RNA encoded by the interleukin and/or interleukin receptor gene. In any of the above embodiments, the 5′-end of the fragment comprising said antisense region can optionally include a phosphate group.

[0054] In one embodiment, the invention features a double-stranded short interfering nucleic acid (siNA) molecule that inhibits the expression of an interleukin and/or interleukin receptor RNA sequence (e.g., wherein said target RNA sequence is encoded by an interleukin and/or interleukin receptor gene involved in the interleukin and/or interleukin receptor pathway), wherein the siNA molecule does not contain any ribonucleotides and wherein each strand of the double-stranded siNA molecule is about 15 to about 30 nucleotides. In one embodiment, the siNA molecule is 21 nucleotides in length. Examples of non-ribonucleotide containing siNA constructs are combinations of stabilization chemistries shown in Table IV in any combination of Sense/Antisense chemistries, such as Stab 7/8, Stab 7/11, Stab 8/8, Stab 18/8, Stab 18/11, Stab 12/13, Stab 7/13, Stab 18/13, Stab 7/19, Stab 8/19, Stab 18/19, Stab 7/20, Stab 8/20, Stab 18/20, Stab 7/32, Stab 8/32, or Stab 18/32 (e.g., any siNA having Stab 7, 8, 11, 12, 13, 14, 15, 17, 18, 19, 20, or 32 sense or antisense strands or any combination thereof).

[0055] In one embodiment, the invention features a chemically synthesized double stranded RNA molecule that directs cleavage of an interleukin and/or interleukin receptor RNA via RNA interference, wherein each strand of said RNA molecule is about 15 to about 30 nucleotides in length; one strand of the RNA molecule comprises nucleotide sequence having sufficient complementarity to the interleukin and/or interleukin receptor RNA for the RNA molecule to direct cleavage of the interleukin and/or interleukin receptor RNA via RNA interference; and wherein at least one strand of the RNA molecule optionally comprises one or more chemically modified nucleotides described herein, such as without limitation deoxynucleotides, 2′-O-methyl nucleotides, 2′-deoxy-2′-fluoro nucloetides, 2′-O-methoxyethyl nucleotides etc.

[0056] In one embodiment, the invention features a medicament comprising a siNA molecule of the invention.

[0057] In one embodiment, the invention features an active ingredient comprising a siNA molecule of the invention.

[0058] In one embodiment, the invention features the use of a double-stranded short interfering nucleic acid (siNA) molecule to inhibit, down-regulate, or reduce expression of an interleukin and/or interleukin receptor gene, wherein the siNA molecule comprises one or more chemical modifications and each strand of the double-stranded siNA is independently about 15 to about 30 or more (e.g., about 15, 16, 17, 18, 19, 20, 21, 22, 23, 24, 25, 26, 27, 28, 29 or 30 or more) nucleotides long. In one embodiment, the siNA molecule of the invention is a double stranded nucleic acid molecule comprising one or more chemical modifications, where each of the two fragments of the siNA molecule independently comprise about 15 to about 40 (e.g. about 15, 16, 17, 18, 19, 20, 21, 22, 23, 24, 25, 26, 27, 28, 29, 30, 31, 23, 33, 34, 35, 36, 37, 38, 39, or 40) nucleotides and where one of the strands comprises at least 15 nucleotides that are complementary to nucleotide sequence of interleukin and/or interleukin receptor encoding RNA or a portion thereof. In a non-limiting example, each of the two fragments of the siNA molecule comprise about 21 nucleotides. In another embodiment, the siNA molecule is a double stranded nucleic acid molecule comprising one or more chemical modifications, where each strand is about 21 nucleotide long and where about 19 nucleotides of each fragment of the siNA molecule are base-paired to the complementary nucleotides of the other fragment of the siNA molecule, wherein at least two 3′ terminal nucleotides of each fragment of the siNA molecule are not base-paired to the nucleotides of the other fragment of the siNA molecule. In another embodiment, the siNA molecule is a double stranded nucleic acid molecule comprising one or more chemical modifications, where each strand is about 19 nucleotide long and where the nucleotides of each fragment of the siNA molecule are base-paired to the complementary nucleotides of the other fragment of the siNA molecule to form at least about 15 (e.g., 15, 16, 17, 18, or 19) base pairs, wherein one or both ends of the siNA molecule are blunt ends. In one embodiment, each of the two 3′ terminal nucleotides of each fragment of the siNA molecule is a 2′-deoxy-pyrimidine nucleotide, such as a 2′-deoxy-thymidine. In another embodiment, all nucleotides of each fragment of the siNA molecule are base-paired to the complementary nucleotides of the other fragment of the siNA molecule. In another embodiment, the siNA molecule is a double stranded nucleic acid molecule of about 19 to about 25 base pairs having a sense region and an antisense region and comprising one or more chemical modifications, where about 19 nucleotides of the antisense region are base-paired to the nucleotide sequence or a portion thereof of the RNA encoded by the interleukin and/or interleukin receptor gene. In another embodiment, about 21 nucleotides of the antisense region are base-paired to the nucleotide sequence or a portion thereof of the RNA encoded by the interleukin and/or interleukin receptor gene. In any of the above embodiments, the 5′-end of the fragment comprising said antisense region can optionally include a phosphate group.

[0059] In one embodiment, the invention features the use of a double-stranded short interfering nucleic acid (siNA) molecule that inhibits, down-regulates, or reduces expression of an interleukin and/or interleukin receptor gene, wherein one of the strands of the double-stranded siNA molecule is an antisense strand which comprises nucleotide sequence that is complementary to nucleotide sequence of interleukin and/or interleukin receptor RNA or a portion thereof, the other strand is a sense strand which comprises nucleotide sequence that is complementary to a nucleotide sequence of the antisense strand and wherein a majority of the pyrimidine nucleotides present in the double-stranded siNA molecule comprises a sugar modification.

[0060] In one embodiment, the invention features a double-stranded short interfering nucleic acid (siNA) molecule that inhibits, down-regulates, or reduces expression of an interleukin and/or interleukin receptor gene, wherein one of the strands of the double-stranded siNA molecule is an antisense strand which comprises nucleotide sequence that is complementary to nucleotide sequence of interleukin and/or interleukin receptor RNA or a portion thereof, wherein the other strand is a sense strand which comprises nucleotide sequence that is complementary to a nucleotide sequence of the antisense strand and wherein a majority of the pyrimidine nucleotides present in the double-stranded siNA molecule comprises a sugar modification.

[0061] In one embodiment, the invention features a double-stranded short interfering nucleic acid (siNA) molecule that inhibits, down-regulates, or reduces expression of an interleukin and/or interleukin receptor gene, wherein one of the strands of the double-stranded siNA molecule is an antisense strand which comprises nucleotide sequence that is complementary to nucleotide sequence of interleukin and/or interleukin receptor RNA that encodes a protein or portion thereof, the other strand is a sense strand which comprises nucleotide sequence that is complementary to a nucleotide sequence of the antisense strand and wherein a majority of the pyrimidine nucleotides present in the double-stranded siNA molecule comprises a sugar modification. In one embodiment, each strand of the siNA molecule comprises about 15 to about 30 or more (e.g., about 15, 16, 17, 18, 19, 20, 21, 22, 23, 24, 25, 26, 27, 28, 29, or 30 or more) nucleotides, wherein each strand comprises at least about 15 nucleotides that are complementary to the nucleotides of the other strand. In one embodiment, the siNA molecule is assembled from two oligonucleotide fragments, wherein one fragment comprises the nucleotide sequence of the antisense strand of the siNA molecule and a second fragment comprises nucleotide sequence of the sense region of the siNA molecule. In one embodiment, the sense strand is connected to the antisense strand via a linker molecule, such as a polynucleotide linker or a non-nucleotide linker. In a further embodiment, the pyrimidine nucleotides present in the sense strand are 2′-deoxy-2′fluoro pyrimidine nucleotides and the purine nucleotides present in the sense region are 2′-deoxy purine nucleotides. In another embodiment, the pyrimidine nucleotides present in the sense strand are 2′-deoxy-2′fluoro pyrimidine nucleotides and the purine nucleotides present in the sense region are 2′-O-methyl purine nucleotides. In still another embodiment, the pyrimidine nucleotides present in the antisense strand are 2′-deoxy-2′-fluoro pyrimidine nucleotides and any purine nucleotides present in the antisense strand are 2′-deoxy purine nucleotides. In another embodiment, the antisense strand comprises one or more 2′-deoxy-2′-fluoro pyrimidine nucleotides and one or more 2′-O-methyl purine nucleotides. In another embodiment, the pyrimidine nucleotides present in the antisense strand are 2′-deoxy-2′-fluoro pyrimidine nucleotides and any purine nucleotides present in the antisense strand are 2′-O-methyl purine nucleotides. In a further embodiment the sense strand comprises a 3′-end and a 5′-end, wherein a terminal cap moiety (e.g., an inverted deoxy abasic moiety or inverted deoxy nucleotide moiety such as inverted thymidine) is present at the 5′-end, the 3′-end, or both of the 5′ and 3′ ends of the sense strand. In another embodiment, the antisense strand comprises a phosphorothioate internucleotide linkage at the 3′ end of the antisense strand. In another embodiment, the antisense strand comprises a glyceryl modification at the 3′ end. In another embodiment, the 5′-end of the antisense strand optionally includes a phosphate group.

[0062] In any of the above-described embodiments of a double-stranded short interfering nucleic acid (siNA) molecule that inhibits expression of an interleukin and/or interleukin receptor gene, wherein a majority of the pyrimidine nucleotides present in the double-stranded siNA molecule comprises a sugar modification, each of the two strands of the siNA molecule can comprise about 15 to about 30 or more (e.g., about 15, 16, 17, 18, 19, 20, 21, 22, 23, 24, 25, 26, 27, 28, 29, or 30 or more) nucleotides. In one embodiment, about 15 to about 30 or more (e.g., about 15, 16, 17, 18, 19, 20, 21, 22, 23, 24, 25, 26, 27, 28, 29, or 30 or more) nucleotides of each strand of the siNA molecule are base-paired to the complementary nucleotides of the other strand of the siNA molecule. In another embodiment, about 15 to about 30 or more (e.g., about 15, 16, 17, 18, 19, 20, 21, 22, 23, 24, 25, 26, 27, 28, 29, or 30 or more) nucleotides of each strand of the siNA molecule are base-paired to the complementary nucleotides of the other strand of the siNA molecule, wherein at least two 3′ terminal nucleotides of each strand of the siNA molecule are not base-paired to the nucleotides of the other strand of the siNA molecule. In another embodiment, each of the two 3′ terminal nucleotides of each fragment of the siNA molecule is a 2′-deoxy-pyrimidine, such as 2′-deoxy-thymidine. In one embodiment, each strand of the siNA molecule is base-paired to the complementary nucleotides of the other strand of the siNA molecule. In one embodiment, about 15 to about 30 (e.g., about 15, 16, 17, 18, 19, 20, 21, 22, 23, 24, 25, 26, 27, 28, 29, or 30) nucleotides of the antisense strand are base-paired to the nucleotide sequence of the interleukin and/or interleukin receptor RNA or a portion thereof. In one embodiment, about 18 to about 25 (e.g., about 18, 19, 20, 21, 22, 23, 24, or 25) nucleotides of the antisense strand are base-paired to the nucleotide sequence of the interleukin and/or interleukin receptor RNA or a portion thereof.

[0063] In one embodiment, the invention features a double-stranded short interfering nucleic acid (siNA) molecule that inhibits expression of an interleukin and/or interleukin receptor gene, wherein one of the strands of the double-stranded siNA molecule is an antisense strand which comprises nucleotide sequence that is complementary to nucleotide sequence of interleukin and/or interleukin receptor RNA or a portion thereof, the other strand is a sense strand which comprises nucleotide sequence that is complementary to a nucleotide sequence of the antisense strand and wherein a majority of the pyrimidine nucleotides present in the double-stranded siNA molecule comprises a sugar modification, and wherein the 5′-end of the antisense strand optionally includes a phosphate group.

[0064] In one embodiment, the invention features a double-stranded short interfering nucleic acid (siNA) molecule that inhibits expression of an interleukin and/or interleukin receptor gene, wherein one of the strands of the double-stranded siNA molecule is an antisense strand which comprises nucleotide sequence that is complementary to nucleotide sequence of interleukin and/or interleukin receptor RNA or a portion thereof, the other strand is a sense strand which comprises nucleotide sequence that is complementary to a nucleotide sequence of the antisense strand and wherein a majority of the pyrimidine nucleotides present in the double-stranded siNA molecule comprises a sugar modification, and wherein the nucleotide sequence or a portion thereof of the antisense strand is complementary to a nucleotide sequence of the untranslated region or a portion thereof of the interleukin and/or interleukin receptor RNA.

[0065] In one embodiment, the invention features a double-stranded short interfering nucleic acid (siNA) molecule that inhibits expression of an interleukin and/or interleukin receptor gene, wherein one of the strands of the double-stranded siNA molecule is an antisense strand which comprises nucleotide sequence that is complementary to nucleotide sequence of interleukin and/or interleukin receptor RNA or a portion thereof, wherein the other strand is a sense strand which comprises nucleotide sequence that is complementary to a nucleotide sequence of the antisense strand, wherein a majority of the pyrimidine nucleotides present in the double-stranded siNA molecule comprises a sugar modification, and wherein the nucleotide sequence of the antisense strand is complementary to a nucleotide sequence of the interleukin and/or interleukin receptor RNA or a portion thereof that is present in the interleukin and/or interleukin receptor RNA.

[0066] In one embodiment, the invention features a composition comprising a siNA molecule of the invention in a pharmaceutically acceptable carrier or diluent.

[0067] In a non-limiting example, the introduction of chemically-modified nucleotides into nucleic acid molecules provides a powerful tool in overcoming potential limitations of in vivo stability and bioavailability inherent to native RNA molecules that are delivered exogenously. For example, the use of chemically-modified nucleic acid molecules can enable a lower dose of a particular nucleic acid molecule for a given therapeutic effect since chemically-modified nucleic acid molecules tend to have a longer half-life in serum. Furthermore, certain chemical modifications can improve the bioavailability of nucleic acid molecules by targeting particular cells or tissues and/or improving cellular uptake of the nucleic acid molecule. Therefore, even if the activity of a chemically-modified nucleic acid molecule is reduced as compared to a native nucleic acid molecule, for example, when compared to an all-RNA nucleic acid molecule, the overall activity of the modified nucleic acid molecule can be greater than that of the native molecule due to improved stability and/or delivery of the molecule. Unlike native unmodified siNA, chemically-modified siNA can also minimize the possibility of activating interferon activity in humans.

[0068] In any of the embodiments of siNA molecules described herein, the antisense region of a siNA molecule of the invention can comprise a phosphorothioate internucleotide linkage at the 3′-end of said antisense region. In any of the embodiments of siNA molecules described herein, the antisense region can comprise about one to about five phosphorothioate internucleotide linkages at the 5′-end of said antisense region. In any of the embodiments of siNA molecules described herein, the 3′-terminal nucleotide overhangs of a siNA molecule of the invention can comprise ribonucleotides or deoxyribonucleotides that are chemically-modified at a nucleic acid sugar, base, or backbone. In any of the embodiments of siNA molecules described herein, the 3′-terminal nucleotide overhangs can comprise one or more universal base ribonucleotides. In any of the embodiments of siNA molecules described herein, the 3′-terminal nucleotide overhangs can comprise one or more acyclic nucleotides.

[0069] One embodiment of the invention provides an expression vector comprising a nucleic acid sequence encoding at least one siNA molecule of the invention in a manner that allows expression of the nucleic acid molecule. Another embodiment of the invention provides a mammalian cell comprising such an expression vector. The mammalian cell can be a human cell. The siNA molecule of the expression vector can comprise a sense region and an antisense region. The antisense region can comprise sequence complementary to a RNA or DNA sequence encoding interleukin and/or interleukin receptor and the sense region can comprise sequence complementary to the antisense region. The siNA molecule can comprise two distinct strands having complementary sense and antisense regions. The siNA molecule can comprise a single strand having complementary sense and antisense regions.

[0070] In one embodiment, the invention features a chemically-modified short interfering nucleic acid (siNA) molecule capable of mediating RNA interference (RNAi) against interleukin and/or interleukin receptor inside a cell or reconstituted in vitro system, wherein the chemical modification comprises one or more (e.g., about 1, 2, 3, 4, 5, 6, 7, 8, 9, 10, or more) nucleotides comprising a backbone modified internucleotide linkage having Formula I: [chemical structure]
[0071] wherein each R1 and R2 is independently any nucleotide, non-nucleotide, or polynucleotide which can be naturally-occurring or chemically-modified, each X and Y is independently O, S, N, alkyl, or substituted alkyl, each Z and W is independently O, S, N, alkyl, substituted alkyl, O-alkyl, S-alkyl, alkaryl, aralkyl, or acetyl and wherein W, X, Y, and Z are optionally not all O. In another embodiment, a backbone modification of the invention comprises a phosphonoacetate and/or thiophosphonoacetate internucleotide linkage (see for example Sheehan et al., 2003, Nucleic Acids Research, 31, 4109-4118).

[0072] The chemically-modified internucleotide linkages having Formula I, for example, wherein any Z, W, X, and/or Y independently comprises a sulphur atom, can be present in one or both oligonucleotide strands of the siNA duplex, for example, in the sense strand, the antisense strand, or both strands. The siNA molecules of the invention can comprise one or more (e.g., about 1, 2, 3, 4, 5, 6, 7, 8, 9, 10, or more) chemically-modified internucleotide linkages having Formula I at the 3′-end, the 5′-end, or both of the 3′ and 5′-ends of the sense strand, the antisense strand, or both strands. For example, an exemplary siNA molecule of the invention can comprise about 1 to about 5 or more (e.g., about 1, 2, 3, 4, 5, or more) chemically-modified internucleotide linkages having Formula I at the 5′-end of the sense strand, the antisense strand, or both strands. In another non-limiting example, an exemplary siNA molecule of the invention can comprise one or more (e.g., about 1, 2, 3, 4, 5, 6, 7, 8, 9, 10, or more) pyrimidine nucleotides with chemically-modified internucleotide linkages having Formula I in the sense strand, the antisense strand, or both strands. In yet another non-limiting example, an exemplary siNA molecule of the invention can comprise one or more (e.g., about 1, 2, 3, 4, 5, 6, 7, 8, 9, 10, or more) purine nucleotides with chemically-modified internucleotide linkages having Formula I in the sense strand, the antisense strand, or both strands. In another embodiment, a siNA molecule of the invention having internucleotide linkage(s) of Formula I also comprises a chemically-modified nucleotide or non-nucleotide having any of Formulae I-VII.

[0073] In one embodiment, the invention features a chemically-modified short interfering nucleic acid (siNA) molecule capable of mediating RNA interference (RNAi) against interleukin and/or interleukin receptor inside a cell or reconstituted in vitro system, wherein the chemical modification comprises one or more (e.g., about 1, 2, 3, 4, 5, 6, 7, 8, 9, 10, or more) nucleotides or non-nucleotides having Formula II: [chemical structure]
wherein each R3, R4, R5, R6, R7, R8, R10, R11 and R12 is independently H, OH, alkyl, substituted alkyl, alkaryl or aralkyl, F, Cl, Br, CN, CF3, OCF3, OCN, O-alkyl, S-alkyl, N-alkyl, O-alkenyl, S-alkenyl, N-alkenyl, SO-alkyl, alkyl-OSH, alkyl-OH, O-alkyl-OH, O-alkyl-SH, S-alkyl-OH, S-alkyl-SH, alkyl-S-alkyl, alkyl-O-alkyl, ONO2, NO2, N3, NH2, aminoalkyl, aminoacid, aminoacyl, ONH2, O-aminoalkyl, O-aminoacid, O-aminoacyl, heterocycloalkyl, heterocycloalkaryl, aminoalkylamino, polyalklylamino, substituted silyl, or group having Formula I or II; R9 is O, S, CH2, S═O, CHF, or CF2, and B is a nucleosidic base such as adenine, guanine, uracil, cytosine, thymine, 2-aminoadenosine, 5-methylcytosine, 2,6-diaminopurine, or any other non-naturally occurring base that can be complementary or non-complementary to target RNA or a non-nucleosidic base such as phenyl, naphthyl, 3-nitropyrrole, 5-nitroindole, nebularine, pyridone, pyridinone, or any other non-naturally occurring universal base that can be complementary or non-complementary to target RNA.

[0074] The chemically-modified nucleotide or non-nucleotide of Formula II can be present in one or both oligonucleotide strands of the siNA duplex, for example in the sense strand, the antisense strand, or both strands. The siNA molecules of the invention can comprise one or more chemically-modified nucleotides or non-nucleotides of Formula II at the 3′-end, the 5′-end, or both of the 3′ and 5′-ends of the sense strand, the antisense strand, or both strands. For example, an exemplary siNA molecule of the invention can comprise about 1 to about 5 or more (e.g., about 1, 2, 3, 4, 5, or more) chemically-modified nucleotides or non-nucleotides of Formula II at the 5′-end of the sense strand, the antisense strand, or both strands. In anther non-limiting example, an exemplary siNA molecule of the invention can comprise about 1 to about 5 or more (e.g., about 1, 2, 3, 4, 5, or more) chemically-modified nucleotides or non-nucleotides of Formula II at the 3′-end of the sense strand, the antisense strand, or both strands.

[0075] In one embodiment, the invention features a chemically-modified short interfering nucleic acid (siNA) molecule capable of mediating RNA interference (RNAi) against interleukin and/or interleukin receptor inside a cell or reconstituted in vitro system, wherein the chemical modification comprises one or more (e.g., about 1, 2, 3, 4, 5, 6, 7, 8, 9, 10, or more) nucleotides or non-nucleotides having Formula III: [chemical structure]
wherein each R3, R4, R5, R6, R7, R8, R10, R11 and R12 is independently H, OH, alkyl, substituted alkyl, alkaryl or aralkyl, F, Cl, Br, CN, CF3, OCF3, OCN, O-alkyl, S-alkyl, N-alkyl, O-alkenyl, S-alkenyl, N-alkenyl, SO-alkyl, alkyl-OSH, alkyl-OH, O-alkyl-OH, O-alkyl-SH, S-alkyl-OH, S-alkyl-SH, alkyl-S-alkyl, alkyl-O-alkyl, ONO2, NO2, N3, NH2, aminoalkyl, aminoacid, aminoacyl, ONH2, O-aminoalkyl, O-aminoacid, O-aminoacyl, heterocycloalkyl, heterocycloalkaryl, aminoalkylamino, polyalklylamino, substituted silyl, or group having Formula I or II; R9 is O, S, CH2, S═O, CHF, or CF2, and B is a nucleosidic base such as adenine, guanine, uracil, cytosine, thymine, 2-aminoadenosine, 5-methylcytosine, 2,6-diaminopurine, or any other non-naturally occurring base that can be employed to be complementary or non-complementary to target RNA or a non-nucleosidic base such as phenyl, naphthyl, 3-nitropyrrole, 5-nitroindole, nebularine, pyridone, pyridinone, or any other non-naturally occurring universal base that can be complementary or non-complementary to target RNA.

[0076] The chemically-modified nucleotide or non-nucleotide of Formula III can be present in one or both oligonucleotide strands of the siNA duplex, for example, in the sense strand, the antisense strand, or both strands. The siNA molecules of the invention can comprise one or more chemically-modified nucleotides or non-nucleotides of Formula III at the 3′-end, the 5′-end, or both of the 3′ and 5′-ends of the sense strand, the antisense strand, or both strands. For example, an exemplary siNA molecule of the invention can comprise about 1 to about 5 or more (e.g., about 1, 2, 3, 4, 5, or more) chemically-modified nucleotide(s) or non-nucleotide(s) of Formula III at the 5′-end of the sense strand, the antisense strand, or both strands. In anther non-limiting example, an exemplary siNA molecule of the invention can comprise about 1 to about 5 or more (e.g., about 1, 2, 3, 4, 5, or more) chemically-modified nucleotide or non-nucleotide of Formula III at the 3′-end of the sense strand, the antisense strand, or both strands.

[0077] In another embodiment, a siNA molecule of the invention comprises a nucleotide having Formula II or III, wherein the nucleotide having Formula II or III is in an inverted configuration. For example, the nucleotide having Formula II or III is connected to the siNA construct in a 3′-3′,3′-2′,2′-3′, or 5′-5′ configuration, such as at the 3′-end, the 5′-end, or both of the 3′ and 5′-ends of one or both siNA strands.

[0078] In one embodiment, the invention features a chemically-modified short interfering nucleic acid (siNA) molecule capable of mediating RNA interference (RNAi) against interleukin and/or interleukin receptor inside a cell or reconstituted in vitro system, wherein the chemical modification comprises a 5′-terminal phosphate group having Formula IV: [chemical structure]
[0079] wherein each X and Y is independently O, S, N, alkyl, substituted alkyl, or alkylhalo; wherein each Z and W is independently O, S, N, alkyl, substituted alkyl, O-alkyl, S-alkyl, alkaryl, aralkyl, alkylhalo, or acetyl; and wherein W, X, Y and Z are not all O.

[0080] In one embodiment, the invention features a siNA molecule having a 5′-terminal phosphate group having Formula IV on the target-complementary strand, for example, a strand complementary to a target RNA, wherein the siNA molecule comprises an all RNA siNA molecule. In another embodiment, the invention features a siNA molecule having a 5′-terminal phosphate group having Formula IV on the target-complementary strand wherein the siNA molecule also comprises about 1 to about 3 (e.g., about 1, 2, or 3) nucleotide 3′-terminal nucleotide overhangs having about 1 to about 4 (e.g., about 1, 2, 3, or 4) deoxyribonucleotides on the 3′-end of one or both strands. In another embodiment, a 5′-terminal phosphate group having Formula IV is present on the target-complementary strand of a siNA molecule of the invention, for example a siNA molecule having chemical modifications having any of Formulae I-VII.

[0081] In one embodiment, the invention features a chemically-modified short interfering nucleic acid (siNA) molecule capable of mediating RNA interference (RNAi) against interleukin and/or interleukin receptor inside a cell or reconstituted in vitro system, wherein the chemical modification comprises one or more phosphorothioate internucleotide linkages. For example, in a non-limiting example, the invention features a chemically-modified short interfering nucleic acid (siNA) having about 1, 2, 3, 4, 5, 6, 7, 8 or more phosphorothioate internucleotide linkages in one siNA strand. In yet another embodiment, the invention features a chemically-modified short interfering nucleic acid (siNA) individually having about 1, 2, 3, 4, 5, 6, 7, 8 or more phosphorothioate internucleotide linkages in both siNA strands. The phosphorothioate internucleotide linkages can be present in one or both oligonucleotide strands of the siNA duplex, for example in the sense strand, the antisense strand, or both strands. The siNA molecules of the invention can comprise one or more phosphorothioate internucleotide linkages at the 3′-end, the 5′-end, or both of the 3′- and 5′-ends of the sense strand, the antisense strand, or both strands. For example, an exemplary siNA molecule of the invention can comprise about 1 to about 5 or more (e.g., about 1, 2, 3, 4, 5, or more) consecutive phosphorothioate internucleotide linkages at the 5′-end of the sense strand, the antisense strand, or both strands. In another non-limiting example, an exemplary siNA molecule of the invention can comprise one or more (e.g., about 1, 2, 3, 4, 5, 6, 7, 8, 9, 10, or more) pyrimidine phosphorothioate internucleotide linkages in the sense strand, the antisense strand, or both strands. In yet another non-limiting example, an exemplary siNA molecule of the invention can comprise one or more (e.g., about 1, 2, 3, 4, 5, 6, 7, 8, 9, 10, or more) purine phosphorothioate internucleotide linkages in the sense strand, the antisense strand, or both strands.

[0082] In one embodiment, the invention features a siNA molecule, wherein the sense strand comprises one or more, for example, about 1, 2, 3, 4, 5, 6, 7, 8, 9, 10, or more phosphorothioate internucleotide linkages, and/or one or more (e.g., about 1, 2, 3, 4, 5, 6, 7, 8, 9, 10 or more) 2′-deoxy, 2′-O-methyl, 2′-deoxy-2′-fluoro, and/or about one or more (e.g., about 1, 2, 3, 4, 5, 6, 7, 8, 9, 10 or more) universal base modified nucleotides, and optionally a terminal cap molecule at the 3′-end, the 5′-end, or both of the 3′- and 5′-ends of the sense strand; and wherein the antisense strand comprises about 1 to about 10 or more, specifically about 1, 2, 3, 4, 5, 6, 7, 8, 9, 10, or more phosphorothioate internucleotide linkages, and/or one or more (e.g., about 1, 2, 3, 4, 5, 6, 7, 8, 9, 10 or more) 2′-deoxy, 2′-O-methyl, 2′-deoxy-2′-fluoro, and/or one or more (e.g., about 1, 2, 3, 4, 5, 6, 7, 8, 9, 10 or more) universal base modified nucleotides, and optionally a terminal cap molecule at the 3′-end, the 5′-end, or both of the 3′- and 5′-ends of the antisense strand. In another embodiment, one or more, for example about 1, 2, 3, 4, 5, 6, 7, 8, 9, 10, or more, pyrimidine nucleotides of the sense and/or antisense siNA strand are chemically-modified with 2′-deoxy, 2′-O-methyl and/or 2′-deoxy-2′-fluoro nucleotides, with or without one or more, for example about 1, 2, 3, 4, 5, 6, 7, 8, 9, 10, or more, phosphorothioate internucleotide linkages and/or a terminal cap molecule at the 3′-end, the 5′-end, or both of the 3′- and 5′-ends, being present in the same or different strand.

[0083] In another embodiment, the invention features a siNA molecule, wherein the sense strand comprises about 1 to about 5, specifically about 1, 2, 3, 4, or 5 phosphorothioate internucleotide linkages, and/or one or more (e.g., about 1, 2, 3, 4, 5, or more) 2′-deoxy, 2′-O-methyl, 2′-deoxy-2′-fluoro, and/or one or more (e.g., about 1, 2, 3, 4, 5, or more) universal base modified nucleotides, and optionally a terminal cap molecule at the 3-end, the 5′-end, or both of the 3′- and 5′-ends of the sense strand; and wherein the antisense strand comprises about 1 to about 5 or more, specifically about 1, 2, 3, 4, 5, or more phosphorothioate internucleotide linkages, and/or one or more (e.g., about 1, 2, 3, 4, 5, 6, 7, 8, 9, 10 or more) 2′-deoxy, 2′-O-methyl, 2′-deoxy-2′-fluoro, and/or one or more (e.g., about 1, 2, 3, 4, 5, 6, 7, 8, 9, 10 or more) universal base modified nucleotides, and optionally a terminal cap molecule at the 3′-end, the 5′-end, or both of the 3′- and 5′-ends of the antisense strand. In another embodiment, one or more, for example about 1, 2, 3, 4, 5, 6, 7, 8, 9, 10, or more, pyrimidine nucleotides of the sense and/or antisense siNA strand are chemically-modified with 2′-deoxy, 2′-O-methyl and/or 2′-deoxy-2′-fluoro nucleotides, with or without about 1 to about 5 or more, for example about 1, 2, 3, 4, 5, or more phosphorothioate internucleotide linkages and/or a terminal cap molecule at the 3′-end, the 5′-end, or both of the 3′- and 5′-ends, being present in the same or different strand.

[0084] In one embodiment, the invention features a siNA molecule, wherein the antisense strand comprises one or more, for example, about 1, 2, 3, 4, 5, 6, 7, 8, 9, 10, or more phosphorothioate internucleotide linkages, and/or about one or more (e.g., about 1, 2, 3, 4, 5, 6, 7, 8, 9, 10 or more) 2′-deoxy, 2′-O-methyl, 2′-deoxy-2′-fluoro, and/or one or more (e.g., about 1, 2, 3, 4, 5, 6, 7, 8, 9, 10 or more) universal base modified nucleotides, and optionally a terminal cap molecule at the 3′-end, the 5′-end, or both of the 3′- and 5′-ends of the sense strand; and wherein the antisense strand comprises about 1 to about 10 or more, specifically about 1, 2, 3, 4, 5, 6, 7, 8, 9, 10 or more phosphorothioate internucleotide linkages, and/or one or more (e.g., about 1, 2, 3, 4, 5, 6, 7, 8, 9, 10 or more) 2′-deoxy, 2′-O-methyl, 2′-deoxy-2′-fluoro, and/or one or more (e.g., about 1, 2, 3, 4, 5, 6, 7, 8, 9, 10 or more) universal base modified nucleotides, and optionally a terminal cap molecule at the 3′-end, the 5′-end, or both of the 3′- and 5′-ends of the antisense strand. In another embodiment, one or more, for example about 1, 2, 3, 4, 5, 6, 7, 8, 9, 10 or more pyrimidine nucleotides of the sense and/or antisense siNA strand are chemically-modified with 2′-deoxy, 2′-O-methyl and/or 2′-deoxy-2′-fluoro nucleotides, with or without one or more, for example, about 1, 2, 3, 4, 5, 6, 7, 8, 9, 10 or more phosphorothioate internucleotide linkages and/or a terminal cap molecule at the 3′-end, the 5′-end, or both of the 3′ and 5′-ends, being present in the same or different strand.

[0085] In another embodiment, the invention features a siNA molecule, wherein the antisense strand comprises about 1 to about 5 or more, specifically about 1, 2, 3, 4, 5 or more phosphorothioate internucleotide linkages, and/or one or more (e.g., about 1, 2, 3, 4, 5, 6, 7, 8, 9, 10 or more) 2′-deoxy, 2′-O-methyl, 2′-deoxy-2′-fluoro, and/or one or more (e.g., about 1, 2, 3, 4, 5, 6, 7, 8, 9, 10 or more) universal base modified nucleotides, and optionally a terminal cap molecule at the 3′-end, the 5′-end, or both of the 3′- and 5′-ends of the sense strand; and wherein the antisense strand comprises about 1 to about 5 or more, specifically about 1, 2, 3, 4, 5 or more phosphorothioate internucleotide linkages, and/or one or more (e.g., about 1, 2, 3, 4, 5, 6, 7, 8, 9, 10 or more) 2′-deoxy, 2′-O-methyl, 2′-deoxy-2′-fluoro, and/or one or more (e.g., about 1, 2, 3, 4, 5, 6, 7, 8, 9, 10 or more) universal base modified nucleotides, and optionally a terminal cap molecule at the 3′-end, the 5′-end, or both of the 3′- and 5′-ends of the antisense strand. In another embodiment, one or more, for example about 1, 2, 3, 4, 5, 6, 7, 8, 9, 10 or more pyrimidine nucleotides of the sense and/or antisense siNA strand are chemically-modified with 2′-deoxy, 2′-O-methyl and/or 2′-deoxy-2′-fluoro nucleotides, with or without about 1 to about 5, for example about 1, 2, 3, 4, 5 or more phosphorothioate internucleotide linkages and/or a terminal cap molecule at the 3′-end, the 5′-end, or both of the 3′- and 5′-ends, being present in the same or different strand.

[0086] In one embodiment, the invention features a chemically-modified short interfering nucleic acid (siNA) molecule having about 1 to about 5 or more (specifically about 1, 2, 3, 4, 5 or more) phosphorothioate internucleotide linkages in each strand of the siNA molecule.

[0087] In another embodiment, the invention features a siNA molecule comprising 2′-5′ internucleotide linkages. The 2′-5′ internucleotide linkage(s) can be at the 3′-end, the 5′-end, or both of the 3′- and 5′-ends of one or both siNA sequence strands. In addition, the 2′-5′ internucleotide linkage(s) can be present at various other positions within one or both siNA sequence strands, for example, about 1, 2, 3, 4, 5, 6, 7, 8, 9, 10, or more including every internucleotide linkage of a pyrimidine nucleotide in one or both strands of the siNA molecule can comprise a 2′-5′ internucleotide linkage, or about 1, 2, 3, 4, 5, 6, 7, 8, 9, 10, or more including every internucleotide linkage of a purine nucleotide in one or both strands of the siNA molecule can comprise a 2′-5′ internucleotide linkage.

[0088] In another embodiment, a chemically-modified siNA molecule of the invention comprises a duplex having two strands, one or both of which can be chemically-modified, wherein each strand is independently about 15 to about 30 (e.g., about 15, 16, 17, 18, 19, 20, 21, 22, 23, 24, 25, 26, 27, 28, 29, or 30) nucleotides in length, wherein the duplex has about 15 to about 30 (e.g., about 15, 16, 17, 18, 19, 20, 21, 22, 23, 24, 25, 26, 27, 28, 29, or 30) base pairs, and wherein the chemical modification comprises a structure having any of Formulae I-VII. For example, an exemplary chemically-modified siNA molecule of the invention comprises a duplex having two strands, one or both of which can be chemically-modified with a chemical modification having any of Formulae I-VII or any combination thereof, wherein each strand consists of about 21 nucleotides, each having a 2-nucleotide 3′-terminal nucleotide overhang, and wherein the duplex has about 19 base pairs. In another embodiment, a siNA molecule of the invention comprises a single stranded hairpin structure, wherein the siNA is about 36 to about 70 (e.g., about 36, 40, 45, 50, 55, 60, 65, or 70) nucleotides in length having about 15 to about 30 (e.g., about 15, 16, 17, 18, 19, 20, 21, 22, 23, 24, 25, 26, 27, 28, 29, or 30) base pairs, and wherein the siNA can include a chemical modification comprising a structure having any of Formulae I-VII or any combination thereof. For example, an exemplary chemically-modified siNA molecule of the invention comprises a linear oligonucleotide having about 42 to about 50 (e.g., about 42, 43, 44, 45, 46, 47, 48, 49, or 50) nucleotides that is chemically-modified with a chemical modification having any of Formulae I-VII or any combination thereof, wherein the linear oligonucleotide forms a hairpin structure having about 19 to about 21 (e.g., 19, 20, or 21) base pairs and a 2-nucleotide 3′-terminal nucleotide overhang. In another embodiment, a linear hairpin siNA molecule of the invention contains a stem loop motif, wherein the loop portion of the siNA molecule is biodegradable. For example, a linear hairpin siNA molecule of the invention is designed such that degradation of the loop portion of the siNA molecule in vivo can generate a double-stranded siNA molecule with 3′-terminal overhangs, such as 3′-terminal nucleotide overhangs comprising about 2 nucleotides.

[0089] In another embodiment, a siNA molecule of the invention comprises a hairpin structure, wherein the siNA is about 25 to about 50 (e.g., about 25, 26, 27, 28, 29, 30, 31, 32, 33, 34, 35, 36, 37, 38, 39, 40, 41, 42, 43, 44, 45, 46, 47, 48, 49, or 50) nucleotides in length having about 3 to about 25 (e.g., about 3, 4, 5, 6, 7, 8, 9, 10, 11, 12, 13, 14, 15, 16, 17, 18, 19, 20, 21, 22, 23, 24, or 25) base pairs, and wherein the siNA can include one or more chemical modifications comprising a structure having any of Formulae I-VII or any combination thereof. For example, an exemplary chemically-modified siNA molecule of the invention comprises a linear oligonucleotide having about 25 to about 35 (e.g., about 25, 26, 27, 28, 29, 30, 31, 32, 33, 34, or 35) nucleotides that is chemically-modified with one or more chemical modifications having any of Formulae I-VII or any combination thereof, wherein the linear oligonucleotide forms a hairpin structure having about 3 to about 25 (e.g., about 3, 4, 5, 6, 7, 8, 9, 10, 11, 12, 13, 14, 15, 16, 17, 18, 19, 20, 21, 22, 23, 24, or 25) base pairs and a 5′-terminal phosphate group that can be chemically modified as described herein (for example a 5′-terminal phosphate group having Formula IV). In another embodiment, a linear hairpin siNA molecule of the invention contains a stem loop motif, wherein the loop portion of the siNA molecule is biodegradable. In one embodiment, a linear hairpin siNA molecule of the invention comprises a loop portion comprising a non-nucleotide linker.

[0090] In another embodiment, a siNA molecule of the invention comprises an asymmetric hairpin structure, wherein the siNA is about 25 to about 50 (e.g., about 25, 26, 27, 28, 29, 30, 31, 32, 33, 34, 35, 36, 37, 38, 39, 40, 41, 42, 43, 44, 45, 46, 47, 48, 49, or 50) nucleotides in length having about 3 to about 25 (e.g., about 3, 4, 5, 6, 7, 8, 9, 10, 11, 12, 13, 14, 15, 16, 17, 18, 19, 20, 21, 22, 23, 24, or 25) base pairs, and wherein the siNA can include one or more chemical modifications comprising a structure having any of Formulae I-VII or any combination thereof. For example, an exemplary chemically-modified siNA molecule of the invention comprises a linear oligonucleotide having about 25 to about 35 (e.g., about 25, 26, 27, 28, 29, 30, 31, 32, 33, 34, or 35) nucleotides that is chemically-modified with one or more chemical modifications having any of Formulae I-VII or any combination thereof, wherein the linear oligonucleotide forms an asymmetric hairpin structure having about 3 to about 25 (e.g., about 3, 4, 5, 6, 7, 8, 9, 10, 11, 12, 13, 14, 15, 16, 17, 18, 19, 20, 21, 22, 23, 24, or 25) base pairs and a 5′-terminal phosphate group that can be chemically modified as described herein (for example a 5′-terminal phosphate group having Formula IV). In one embodiment, an asymmetric hairpin siNA molecule of the invention contains a stem loop motif, wherein the loop portion of the siNA molecule is biodegradable. In another embodiment, an asymmetric hairpin siNA molecule of the invention comprises a loop portion comprising a non-nucleotide linker.

[0091] In another embodiment, a siNA molecule of the invention comprises an asymmetric double stranded structure having separate polynucleotide strands comprising sense and antisense regions, wherein the antisense region is about 15 to about 30 (e.g., about 15, 16, 17, 18, 19, 20, 21, 22, 23, 24, 25, 26, 27, 28, 29, or 30) nucleotides in length, wherein the sense region is about 3 to about 25 (e.g., about 3, 4, 5, 6, 7, 8, 9, 10, 11, 12, 13, 14, 15, 16, 17, 18, 19, 20, 21, 22, 23, 24, or 25) nucleotides in length, wherein the sense region and the antisense region have at least 3 complementary nucleotides, and wherein the siNA can include one or more chemical modifications comprising a structure having any of Formulae I-VII or any combination thereof. For example, an exemplary chemically-modified siNA molecule of the invention comprises an asymmetric double stranded structure having separate polynucleotide strands comprising sense and antisense regions, wherein the antisense region is about 18 to about 23 (e.g., about 18, 19, 20, 21, 22, or 23) nucleotides in length and wherein the sense region is about 3 to about 15 (e.g., about 3, 4, 5, 6, 7, 8, 9, 10, 11, 12, 13, 14, or 15) nucleotides in length, wherein the sense region the antisense region have at least 3 complementary nucleotides, and wherein the siNA can include one or more chemical modifications comprising a structure having any of Formulae I-VII or any combination thereof. In another embodiment, the asymmetic double stranded siNA molecule can also have a 5′-terminal phosphate group that can be chemically modified as described herein (for example a 5′-terminal phosphate group having Formula IV).

[0092] In another embodiment, a siNA molecule of the invention comprises a circular nucleic acid molecule, wherein the siNA is about 38 to about 70 (e.g., about 38, 40, 45, 50, 55, 60, 65, or 70) nucleotides in length having about 15 to about 30 (e.g., about 15, 16, 17, 18, 19, 20, 21, 22, 23, 24, 25, 26, 27, 28, 29, or 30) base pairs, and wherein the siNA can include a chemical modification, which comprises a structure having any of Formulae I-VII or any combination thereof. For example, an exemplary chemically-modified siNA molecule of the invention comprises a circular oligonucleotide having about 42 to about 50 (e.g., about 42, 43, 44, 45, 46, 47, 48, 49, or 50) nucleotides that is chemically-modified with a chemical modification having any of Formulae I-VII or any combination thereof, wherein the circular oligonucleotide forms a dumbbell shaped structure having about 19 base pairs and 2 loops.

[0093] In another embodiment, a circular siNA molecule of the invention contains two loop motifs, wherein one or both loop portions of the siNA molecule is biodegradable. For example, a circular siNA molecule of the invention is designed such that degradation of the loop portions of the siNA molecule in vivo can generate a double-stranded siNA molecule with 3′-terminal overhangs, such as 3′-terminal nucleotide overhangs comprising about 2 nucleotides.

[0094] In one embodiment, a siNA molecule of the invention comprises at least one (e.g., about 1, 2, 3, 4, 5, 6, 7, 8, 9, 10, or more) abasic moiety, for example a compound having Formula V: [chemical structure]
wherein each R3, R4, R5, R6, R7, R8, R10, R11, R12, and R13 is independently H, OH, alkyl, substituted alkyl, alkaryl or aralkyl, F, Cl, Br, CN, CF3, OCF3, OCN, O-alkyl, S-alkyl, N-alkyl, O-alkenyl, S-alkenyl, N-alkenyl, SO-alkyl, alkyl-OSH, alkyl-OH, O-alkyl-OH, O-alkyl-SH, S-alkyl-OH, S-alkyl-SH, alkyl-S-alkyl, alkyl-O-alkyl, ONO2, NO2, N3, NH2, aminoalkyl, aminoacid, aminoacyl, ONH2, O-aminoalkyl, O-aminoacid, O-aminoacyl, heterocycloalkyl, heterocycloalkaryl, aminoalkylamino, polyalklylamino, substituted silyl, or group having Formula I or II; R9 is O, S, CH2, S═O, CHF, or CF2.

[0095] In one embodiment, a siNA molecule of the invention comprises at least one (e.g., about 1, 2, 3, 4, 5, 6, 7, 8, 9, 10, or more) inverted abasic moiety, for example a compound having Formula VI: [chemical structure]
wherein each R3, R4, R5, R6, R7, R8, R10, R11, R12, and R13 is independently H, OH, alkyl, substituted alkyl, alkaryl or aralkyl, F, Cl, Br, CN, CF3, OCF3, OCN, O-alkyl, S-alkyl, N-alkyl, O-alkenyl, S-alkenyl, N-alkenyl, SO-alkyl, alkyl-OSH, alkyl-OH, O-alkyl-OH, O-alkyl-SH, S-alkyl-OH, S-alkyl-SH, alkyl-S-alkyl, alkyl-O-alkyl, ONO2, NO2, N3, NH2, aminoalkyl, aminoacid, aminoacyl, ONH2, O-aminoalkyl, O-aminoacid, O-aminoacyl, heterocycloalkyl, heterocycloalkaryl, aminoalkylamino, polyalklylamino, substituted silyl, or group having Formula I or II; R9 is O, S, CH2, S═O, CHF, or CF2, and either R2, R3, R8 or R13 serve as points of attachment to the siNA molecule of the invention.

[0096] In another embodiment, a siNA molecule of the invention comprises at least one (e.g., about 1, 2, 3, 4, 5, 6, 7, 8, 9, 10, or more) substituted polyalkyl moieties, for example a compound having Formula VII: [chemical structure]
wherein each n is independently an integer from 1 to 12, each R1, R2 and R3 is independently H, OH, alkyl, substituted alkyl, alkaryl or aralkyl, F, Cl, Br, CN, CF3, OCF3, OCN, O-alkyl, S-alkyl, N-alkyl, O-alkenyl, S-alkenyl, N-alkenyl, SO-alkyl, alkyl-OSH, alkyl-OH, O-alkyl-OH, O-alkyl-SH, S-alkyl-OH, S-alkyl-SH, alkyl-S-alkyl, alkyl-O-alkyl, ONO2, NO2, N3, NH2, aminoalkyl, aminoacid, aminoacyl, ONH2, O-aminoalkyl, O-aminoacid, O-aminoacyl, heterocycloalkyl, heterocycloalkaryl, aminoalkylamino, polyalkylamino, substituted silyl, or a group having Formula I, and R1, R2 or R3 serves as points of attachment to the siNA molecule of the invention.

[0097] In another embodiment, the invention features a compound having Formula VII, wherein R1 and R2 are hydroxyl (OH) groups, n=1, and R3 comprises O and is the point of attachment to the 3′-end, the 5′-end, or both of the 3′ and 5′-ends of one or both strands of a double-stranded siNA molecule of the invention or to a single-stranded siNA molecule of the invention. This modification is referred to herein as “glyceryl” (for example modification 6 in FIG. 10).

[0098] In another embodiment, a chemically modified nucleoside or non-nucleoside (e.g. a moiety having any of Formula V, VI or VII) of the invention is at the 3′-end, the 5′-end, or both of the 3′ and 5′-ends of a siNA molecule of the invention. For example, chemically modified nucleoside or non-nucleoside (e.g., a moiety having Formula V, VI or VII) can be present at the 3′-end, the 5′-end, or both of the 3′ and 5′-ends of the antisense strand, the sense strand, or both antisense and sense strands of the siNA molecule. In one embodiment, the chemically modified nucleoside or non-nucleoside (e.g., a moiety having Formula V, VI or VII) is present at the 5′-end and 3′-end of the sense strand and the 3′-end of the antisense strand of a double stranded siNA molecule of the invention. In one embodiment, the chemically modified nucleoside or non-nucleoside (e.g., a moiety having Formula V, VI or VII) is present at the terminal position of the 5′-end and 3′-end of the sense strand and the 3′-end of the antisense strand of a double stranded siNA molecule of the invention. In one embodiment, the chemically modified nucleoside or non-nucleoside (e.g., a moiety having Formula V, VI or VII) is present at the two terminal positions of the 5′-end and 3′-end of the sense strand and the 3′-end of the antisense strand of a double stranded siNA molecule of the invention. In one embodiment, the chemically modified nucleoside or non-nucleoside (e.g., a moiety having Formula V, VI or VII) is present at the penultimate position of the 5′-end and 3′-end of the sense strand and the 3′-end of the antisense strand of a double stranded siNA molecule of the invention. In addition, a moiety having Formula VII can be present at the 3′-end or the 5′-end of a hairpin siNA molecule as described herein.

[0099] In another embodiment, a siNA molecule of the invention comprises an abasic residue having Formula V or VI, wherein the abasic residue having Formula VI or VI is connected to the siNA construct in a 3′-3′,3′-2′,2′-3′, or 5′-5′ configuration, such as at the 3′-end, the 5′-end, or both of the 3′ and 5′-ends of one or both siNA strands.

[0100] In one embodiment, a siNA molecule of the invention comprises one or more (e.g., about 1, 2, 3, 4, 5, 6, 7, 8, 9, 10, or more) locked nucleic acid (LNA) nucleotides, for example, at the 5′-end, the 3′-end, both of the 5′ and 3′-ends, or any combination thereof, of the siNA molecule.

[0101] In another embodiment, a siNA molecule of the invention comprises one or more (e.g., about 1, 2, 3, 4, 5, 6, 7, 8, 9, 10, or more) acyclic nucleotides, for example, at the 5′-end, the 3′-end, both of the 5′ and 3′-ends, or any combination thereof, of the siNA molecule.

[0102] In one embodiment, the invention features a chemically-modified short interfering nucleic acid (siNA) molecule of the invention comprising a sense region, wherein any (e.g., one or more or all) pyrimidine nucleotides present in the sense region are 2′-deoxy-2′-fluoro pyrimidine nucleotides (e.g., wherein all pyrimidine nucleotides are 2′-deoxy-2′-fluoro pyrimidine nucleotides or alternately a plurality of pyrimidine nucleotides are 2′-deoxy-2′-fluoro pyrimidine nucleotides), and wherein any (e.g., one or more or all) purine nucleotides present in the sense region are 2′-deoxy purine nucleotides (e.g., wherein all purine nucleotides are 2′-deoxy purine nucleotides or alternately a plurality of purine nucleotides are 2′-deoxy purine nucleotides).

[0103] In one embodiment, the invention features a chemically-modified short interfering nucleic acid (siNA) molecule of the invention comprising a sense region, wherein any (e.g., one or more or all) pyrimidine nucleotides present in the sense region are 2′-deoxy-2′-fluoro pyrimidine nucleotides (e.g., wherein all pyrimidine nucleotides are 2′-deoxy-2′-fluoro pyrimidine nucleotides or alternately a plurality of pyrimidine nucleotides are 2′-deoxy-2′-fluoro pyrimidine nucleotides), and wherein any (e.g., one or more or all) purine nucleotides present in the sense region are 2′-deoxy purine nucleotides (e.g., wherein all purine nucleotides are 2′-deoxy purine nucleotides or alternately a plurality of purine nucleotides are 2′-deoxy purine nucleotides), wherein any nucleotides comprising a 3′-terminal nucleotide overhang that are present in said sense region are 2′-deoxy nucleotides.

[0104] In one embodiment, the invention features a chemically-modified short interfering nucleic acid (siNA) molecule of the invention comprising a sense region, wherein any (e.g., one or more or all) pyrimidine nucleotides present in the sense region are 2′-deoxy-2′-fluoro pyrimidine nucleotides (e.g., wherein all pyrimidine nucleotides are 2′-deoxy-2′-fluoro pyrimidine nucleotides or alternately a plurality of pyrimidine nucleotides are 2′-deoxy-2′-fluoro pyrimidine nucleotides), and wherein any (e.g., one or more or all) purine nucleotides present in the sense region are 2′-O-methyl purine nucleotides (e.g., wherein all purine nucleotides are 2′-O-methyl purine nucleotides or alternately a plurality of purine nucleotides are 2′-O-methyl purine nucleotides).

[0105] In one embodiment, the invention features a chemically-modified short interfering nucleic acid (siNA) molecule of the invention comprising a sense region, wherein any (e.g., one or more or all) pyrimidine nucleotides present in the sense region are 2′-deoxy-2′-fluoro pyrimidine nucleotides (e.g., wherein all pyrimidine nucleotides are 2′-deoxy-2′-fluoro pyrimidine nucleotides or alternately a plurality of pyrimidine nucleotides are 2′-deoxy-2′-fluoro pyrimidine nucleotides), wherein any (e.g., one or more or all) purine nucleotides present in the sense region are 2′-O-methyl purine nucleotides (e.g., wherein all purine nucleotides are 2′-O-methyl purine nucleotides or alternately a plurality of purine nucleotides are 2′-O-methyl purine nucleotides), and wherein any nucleotides comprising a 3′-terminal nucleotide overhang that are present in said sense region are 2′-deoxy nucleotides.

[0106] In one embodiment, the invention features a chemically-modified short interfering nucleic acid (siNA) molecule of the invention comprising an antisense region, wherein any (e.g., one or more or all) pyrimidine nucleotides present in the antisense region are 2′-deoxy-2′-fluoro pyrimidine nucleotides (e.g., wherein all pyrimidine nucleotides are 2′-deoxy-2′-fluoro pyrimidine nucleotides or alternately a plurality of pyrimidine nucleotides are 2′-deoxy-2′-fluoro pyrimidine nucleotides), and wherein any (e.g., one or more or all) purine nucleotides present in the antisense region are 2′-O-methyl purine nucleotides (e.g., wherein all purine nucleotides are 2′-O-methyl purine nucleotides or alternately a plurality of purine nucleotides are 2′-O-methyl purine nucleotides).

[0107] In one embodiment, the invention features a chemically-modified short interfering nucleic acid (siNA) molecule of the invention comprising an antisense region, wherein any (e.g., one or more or all) pyrimidine nucleotides present in the antisense region are 2′-deoxy-2′-fluoro pyrimidine nucleotides (e.g., wherein all pyrimidine nucleotides are 2′-deoxy-2′-fluoro pyrimidine nucleotides or alternately a plurality of pyrimidine nucleotides are 2′-deoxy-2′-fluoro pyrimidine nucleotides), wherein any (e.g., one or more or all) purine nucleotides present in the antisense region are 2′-O-methyl purine nucleotides (e.g., wherein all purine nucleotides are 2′-O-methyl purine nucleotides or alternately a plurality of purine nucleotides are 2′-O-methyl purine nucleotides), and wherein any nucleotides comprising a 3′-terminal nucleotide overhang that are present in said antisense region are 2′-deoxy nucleotides.

[0108] In one embodiment, the invention features a chemically-modified short interfering nucleic acid (siNA) molecule of the invention comprising an antisense region, wherein any (e.g., one or more or all) pyrimidine nucleotides present in the antisense region are 2′-deoxy-2′-fluoro pyrimidine nucleotides (e.g., wherein all pyrimidine nucleotides are 2′-deoxy-2′-fluoro pyrimidine nucleotides or alternately a plurality of pyrimidine nucleotides are 2′-deoxy-2′-fluoro pyrimidine nucleotides), and wherein any (e.g., one or more or all) purine nucleotides present in the antisense region are 2′-deoxy purine nucleotides (e.g., wherein all purine nucleotides are 2′-deoxy purine nucleotides or alternately a plurality of purine nucleotides are 2′-deoxy purine nucleotides).

[0109] In one embodiment, the invention features a chemically-modified short interfering nucleic acid (siNA) molecule of the invention comprising an antisense region, wherein any (e.g., one or more or all) pyrimidine nucleotides present in the antisense region are 2′-deoxy-2′-fluoro pyrimidine nucleotides (e.g., wherein all pyrimidine nucleotides are 2′-deoxy-2′-fluoro pyrimidine nucleotides or alternately a plurality of pyrimidine nucleotides are 2′-deoxy-2′-fluoro pyrimidine nucleotides), and wherein any (e.g., one or more or all) purine nucleotides present in the antisense region are 2′-O-methyl purine nucleotides (e.g., wherein all purine nucleotides are 2′-O-methyl purine nucleotides or alternately a plurality of purine nucleotides are 2′-O-methyl purine nucleotides).

[0110] In one embodiment, the invention features a chemically-modified short interfering nucleic acid (siNA) molecule of the invention capable of mediating RNA interference (RNAi) against interleukin and/or interleukin receptor inside a cell or reconstituted in vitro system comprising a sense region, wherein one or more pyrimidine nucleotides present in the sense region are 2′-deoxy-2′-fluoro pyrimidine nucleotides (e.g., wherein all pyrimidine nucleotides are 2′-deoxy-2′-fluoro pyrimidine nucleotides or alternately a plurality of pyrimidine nucleotides are 2′-deoxy-2′-fluoro pyrimidine nucleotides), and one or more purine nucleotides present in the sense region are 2′-deoxy purine nucleotides (e.g., wherein all purine nucleotides are 2′-deoxy purine nucleotides or alternately a plurality of purine nucleotides are 2′-deoxy purine nucleotides), and an antisense region, wherein one or more pyrimidine nucleotides present in the antisense region are 2′-deoxy-2′-fluoro pyrimidine nucleotides (e.g., wherein all pyrimidine nucleotides are 2′-deoxy-2′-fluoro pyrimidine nucleotides or alternately a plurality of pyrimidine nucleotides are 2′-deoxy-2′-fluoro pyrimidine nucleotides), and one or more purine nucleotides present in the antisense region are 2′-O-methyl purine nucleotides (e.g., wherein all purine nucleotides are 2′-O-methyl purine nucleotides or alternately a plurality of purine nucleotides are 2′-O-methyl purine nucleotides). The sense region and/or the antisense region can have a terminal cap modification, such as any modification described herein or shown in FIG. 10, that is optionally present at the 3′-end, the 5′-end, or both of the 3′ and 5′-ends of the sense and/or antisense sequence. The sense and/or antisense region can optionally further comprise a 3′-terminal nucleotide overhang having about 1 to about 4 (e.g., about 1, 2, 3, or 4) 2′-deoxynucleotides. The overhang nucleotides can further comprise one or more (e.g., about 1, 2, 3, 4 or more) phosphorothioate, phosphonoacetate, and/or thiophosphonoacetate internucleotide linkages. Non-limiting examples of these chemically-modified siNAs are shown in FIGS. 4 and 5 and Tables III and IV herein. In any of these described embodiments, the purine nucleotides present in the sense region are alternatively 2′-O-methyl purine nucleotides (e.g., wherein all purine nucleotides are 2′-O-methyl purine nucleotides or alternately a plurality of purine nucleotides are 2′-O-methyl purine nucleotides) and one or more purine nucleotides present in the antisense region are 2′-O-methyl purine nucleotides (e.g., wherein all purine nucleotides are 2′-O-methyl purine nucleotides or alternately a plurality of purine nucleotides are 2′-O-methyl purine nucleotides). Also, in any of these embodiments, one or more purine nucleotides present in the sense region are alternatively purine ribonucleotides (e.g., wherein all purine nucleotides are purine ribonucleotides or alternately a plurality of purine nucleotides are purine ribonucleotides) and any purine nucleotides present in the antisense region are 2′-O-methyl purine nucleotides (e.g., wherein all purine nucleotides are 2′-O-methyl purine nucleotides or alternately a plurality of purine nucleotides are 2′-O-methyl purine nucleotides). Additionally, in any of these embodiments, one or more purine nucleotides present in the sense region and/or present in the antisense region are alternatively selected from the group consisting of 2′-deoxy nucleotides, locked nucleic acid (LNA) nucleotides, 2′-methoxyethyl nucleotides, 4′-thionucleotides, and 2′-O-methyl nucleotides (e.g., wherein all purine nucleotides are selected from the group consisting of 2′-deoxy nucleotides, locked nucleic acid (LNA) nucleotides, 2′-methoxyethyl nucleotides, 4′-thionucleotides, and 2′-O-methyl nucleotides or alternately a plurality of purine nucleotides are selected from the group consisting of 2′-deoxy nucleotides, locked nucleic acid (LNA) nucleotides, 2′-methoxyethyl nucleotides, 4′-thionucleotides, and 2′-O-methyl nucleotides).

[0111] In another embodiment, any modified nucleotides present in the siNA molecules of the invention, preferably in the antisense strand of the siNA molecules of the invention, but also optionally in the sense and/or both antisense and sense strands, comprise modified nucleotides having properties or characteristics similar to naturally occurring ribonucleotides. For example, the invention features siNA molecules including modified nucleotides having a Northern conformation (e.g., Northern pseudorotation cycle, see for example Saenger, Principles of Nucleic Acid Structure, Springer-Verlag ed., 1984). As such, chemically modified nucleotides present in the siNA molecules of the invention, preferably in the antisense strand of the siNA molecules of the invention, but also optionally in the sense and/or both antisense and sense strands, are resistant to nuclease degradation while at the same time maintaining the capacity to mediate RNAi. Non-limiting examples of nucleotides having a northern configuration include locked nucleic acid (LNA) nucleotides (e.g., 2′-O, 4′-C-methylene-(D-ribofuranosyl) nucleotides); 2′-methoxyethoxy (MOE) nucleotides; 2′-methyl-thio-ethyl, 2′-deoxy-2′-fluoro nucleotides, 2′-deoxy-2′-chloro nucleotides, 2′-azido nucleotides, and 2′-O-methyl nucleotides.

[0112] In one embodiment, the sense strand of a double stranded siNA molecule of the invention comprises a terminal cap moiety, (see for example FIG. 10) such as an inverted deoxyabaisc moiety, at the 3′-end, 5′-end, or both 3′ and 5′-ends of the sense strand.

[0113] In one embodiment, the invention features a chemically-modified short interfering nucleic acid molecule (siNA) capable of mediating RNA interference (RNAi) against interleukin and/or interleukin receptor inside a cell or reconstituted in vitro system, wherein the chemical modification comprises a conjugate covalently attached to the chemically-modified siNA molecule. Non-limiting examples of conjugates contemplated by the invention include conjugates and ligands described in Vargeese et al., U.S. Ser. No. 10/427,160, filed Apr. 30, 2003, incorporated by reference herein in its entirety, including the drawings. In another embodiment, the conjugate is covalently attached to the chemically-modified siNA molecule via a biodegradable linker. In one embodiment, the conjugate molecule is attached at the 3′-end of either the sense strand, the antisense strand, or both strands of the chemically-modified siNA molecule. In another embodiment, the conjugate molecule is attached at the 5′-end of either the sense strand, the antisense strand, or both strands of the chemically-modified siNA molecule. In yet another embodiment, the conjugate molecule is attached both the 3′-end and 5′-end of either the sense strand, the antisense strand, or both strands of the chemically-modified siNA molecule, or any combination thereof. In one embodiment, a conjugate molecule of the invention comprises a molecule that facilitates delivery of a chemically-modified siNA molecule into a biological system, such as a cell. In another embodiment, the conjugate molecule attached to the chemically-modified siNA molecule is a polyethylene glycol, human serum albumin, or a ligand for a cellular receptor that can mediate cellular uptake. Examples of specific conjugate molecules contemplated by the instant invention that can be attached to chemically-modified siNA molecules are described in Vargeese et al., U.S. Ser. No. 10/201,394, filed Jul. 22, 2002 incorporated by reference herein. The type of conjugates used and the extent of conjugation of siNA molecules of the invention can be evaluated for improved pharmacokinetic profiles, bioavailability, and/or stability of siNA constructs while at the same time maintaining the ability of the siNA to mediate RNAi activity. As such, one skilled in the art can screen siNA constructs that are modified with various conjugates to determine whether the siNA conjugate complex possesses improved properties while maintaining the ability to mediate RNAi, for example in animal models as are generally known in the art.

[0114] In one embodiment, the invention features a short interfering nucleic acid (siNA) molecule of the invention, wherein the siNA further comprises a nucleotide, non-nucleotide, or mixed nucleotide/non-nucleotide linker that joins the sense region of the siNA to the antisense region of the siNA. In one embodiment, a nucleotide linker of the invention can be a linker of ≧2 nucleotides in length, for example about 3, 4, 5, 6, 7, 8, 9, or 10 nucleotides in length. In another embodiment, the nucleotide linker can be a nucleic acid aptamer. By “aptamer” or “nucleic acid aptamer” as used herein is meant a nucleic acid molecule that binds specifically to a target molecule wherein the nucleic acid molecule has sequence that comprises a sequence recognized by the target molecule in its natural setting. Alternately, an aptamer can be a nucleic acid molecule that binds to a target molecule where the target molecule does not naturally bind to a nucleic acid. The target molecule can be any molecule of interest. For example, the aptamer can be used to bind to a ligand-binding domain of a protein, thereby preventing interaction of the naturally occurring ligand with the protein. This is a non-limiting example and those in the art will recognize that other embodiments can be readily generated using techniques generally known in the art. (See, for example, Gold et al., 1995, Annu. Rev. Biochem., 64, 763; Brody and Gold, 2000, J. Biotechnol., 74, 5; Sun, 2000, Curr. Opin. Mol. Ther., 2, 100; Kusser, 2000, J. Biotechnol., 74, 27; Hermann and Patel, 2000, Science, 287, 820; and Jayasena, 1999, Clinical Chemistry, 45, 1628.)

[0115] In yet another embodiment, a non-nucleotide linker of the invention comprises abasic nucleotide, polyether, polyamine, polyamide, peptide, carbohydrate, lipid, polyhydrocarbon, or other polymeric compounds (e.g. polyethylene glycols such as those having between 2 and 100 ethylene glycol units). Specific examples include those described by Seela and Kaiser, Nucleic Acids Res. 1990, 18: 6353 and Nucleic Acids Res. 1987, 15: 3113; Cload and Schepartz, J. Am. Chem. Soc. 1991, 113: 6324; Richardson and Schepartz, J. Am. Chem. Soc. 1991, 113: 5109; Ma et al., Nucleic Acids Res. 1993, 21: 2585 and Biochemistry 1993, 32: 1751; Durand et al., Nucleic Acids Res. 1990, 18: 6353; McCurdy et al., Nucleosides & Nucleotides 1991, 10: 287; Jschke et al., Tetrahedron Lett. 1993, 34: 301; Ono et al., Biochemistry 1991, 30: 9914; Arnold et al., International Publication No. WO 89/02439; Usman et al., International Publication No. WO 95/06731; Dudycz et al., International Publication No. WO 95/11910 and Ferentz and Verdine, J. Am. Chem. Soc. 1991, 113: 4000, all hereby incorporated by reference herein. A “non-nucleotide” further means any group or compound that can be incorporated into a nucleic acid chain in the place of one or more nucleotide units, including either sugar and/or phosphate substitutions, and allows the remaining bases to exhibit their enzymatic activity. The group or compound can be abasic in that it does not contain a commonly recognized nucleotide base, such as adenosine, guanine, cytosine, uracil or thymine, for example at the C1 position of the sugar.

[0116] In one embodiment, the invention features a short interfering nucleic acid (siNA) molecule capable of mediating RNA interference (RNAi) inside a cell or reconstituted in vitro system, wherein one or both strands of the siNA molecule that are assembled from two separate oligonucleotides do not comprise any ribonucleotides. For example, a siNA molecule can be assembled from a single oligonculeotide where the sense and antisense regions of the siNA comprise separate oligonucleotides that do not have any ribonucleotides (e.g., nucleotides having a 2′-OH group) present in the oligonucleotides. In another example, a siNA molecule can be assembled from a single oligonculeotide where the sense and antisense regions of the siNA are linked or circularized by a nucleotide or non-nucleotide linker as described herein, wherein the oligonucleotide does not have any ribonucleotides (e.g., nucleotides having a 2′-OH group) present in the oligonucleotide. Applicant has surprisingly found that the presense of ribonucleotides (e.g., nucleotides having a 2′-hydroxyl group) within the siNA molecule is not required or essential to support RNAi activity. As such, in one embodiment, all positions within the siNA can include chemically modified nucleotides and/or non-nucleotides such as nucleotides and or non-nucleotides having Formula I, II, III, IV, V, VI, or VII or any combination thereof to the extent that the ability of the siNA molecule to support RNAi activity in a cell is maintained.

[0117] In one embodiment, a siNA molecule of the invention is a single stranded siNA molecule that mediates RNAi activity in a cell or reconstituted in vitro system comprising a single stranded polynucleotide having complementarity to a target nucleic acid sequence. In another embodiment, the single stranded siNA molecule of the invention comprises a 5′-terminal phosphate group. In another embodiment, the single stranded siNA molecule of the invention comprises a 5′-terminal phosphate group and a 3′-terminal phosphate group (e.g., a 2′,3′-cyclic phosphate). In another embodiment, the single stranded siNA molecule of the invention comprises about 15 to about 30 (e.g., about 15, 16, 17, 18, 19, 20, 21, 22, 23, 24, 25, 26, 27, 28, 29, or 30) nucleotides. In yet another embodiment, the single stranded siNA molecule of the invention comprises one or more chemically modified nucleotides or non-nucleotides described herein. For example, all the positions within the siNA molecule can include chemically-modified nucleotides such as nucleotides having any of Formulae I-VII, or any combination thereof to the extent that the ability of the siNA molecule to support RNAi activity in a cell is maintained.

[0118] In one embodiment, a siNA molecule of the invention is a single stranded siNA molecule that mediates RNAi activity in a cell or reconstituted in vitro system comprising a single stranded polynucleotide having complementarity to a target nucleic acid sequence, wherein one or more pyrimidine nucleotides present in the siNA are 2′-deoxy-2′-fluoro pyrimidine nucleotides (e.g., wherein all pyrimidine nucleotides are 2′-deoxy-2′-fluoro pyrimidine nucleotides or alternately a plurality of pyrimidine nucleotides are 2′-deoxy-2′-fluoro pyrimidine nucleotides), and wherein any purine nucleotides present in the antisense region are 2′-O-methyl purine nucleotides (e.g., wherein all purine nucleotides are 2′-O-methyl purine nucleotides or alternately a plurality of purine nucleotides are 2′-O-methyl purine nucleotides), and a terminal cap modification, such as any modification described herein or shown in FIG. 10, that is optionally present at the 3′-end, the 5′-end, or both of the 3′ and 5′-ends of the antisense sequence. The siNA optionally further comprises about 1 to about 4 or more (e.g., about 1, 2, 3, 4 or more) terminal 2′-deoxynucleotides at the 3′-end of the siNA molecule, wherein the terminal nucleotides can further comprise one or more (e.g., 1, 2, 3, 4 or more) phosphorothioate, phosphonoacetate, and/or thiophosphonoacetate internucleotide linkages, and wherein the siNA optionally further comprises a terminal phosphate group, such as a 5′-terminal phosphate group. In any of these embodiments, any purine nucleotides present in the antisense region are alternatively 2′-deoxy purine nucleotides (e.g., wherein all purine nucleotides are 2′-deoxy purine nucleotides or alternately a plurality of purine nucleotides are 2′-deoxy purine nucleotides). Also, in any of these embodiments, any purine nucleotides present in the siNA (i.e., purine nucleotides present in the sense and/or antisense region) can alternatively be locked nucleic acid (LNA) nucleotides (e.g., wherein all purine nucleotides are LNA nucleotides or alternately a plurality of purine nucleotides are LNA nucleotides). Also, in any of these embodiments, any purine nucleotides present in the siNA are alternatively 2′-methoxyethyl purine nucleotides (e.g., wherein all purine nucleotides are 2′-methoxyethyl purine nucleotides or alternately a plurality of purine nucleotides are 2′-methoxyethyl purine nucleotides). In another embodiment, any modified nucleotides present in the single stranded siNA molecules of the invention comprise modified nucleotides having properties or characteristics similar to naturally occurring ribonucleotides. For example, the invention features siNA molecules including modified nucleotides having a Northern conformation (e.g., Northern pseudorotation cycle, see for example Saenger, Principles of Nucleic Acid Structure, Springer-Verlag ed., 1984). As such, chemically modified nucleotides present in the single stranded siNA molecules of the invention are preferably resistant to nuclease degradation while at the same time maintaining the capacity to mediate RNAi.

[0119] In one embodiment, a siNA molecule of the invention comprises chemically modified nucleotides or non-nucleotides (e.g., having any of Formulae I-VII, such as 2′-deoxy, 2′-deoxy-2′-fluoro, or 2′-O-methyl nucleotides) at alternating positions within one or more strands or regions of the siNA molecule. For example, such chemical modifications can be introduced at every other position of a RNA based siNA molecule, starting at either the first or second nucleotide from the 3′-end or 5′-end of the siNA. In a non-limiting example, a double stranded siNA molecule of the invention in which each strand of the siNA is 21 nucleotides in length is featured wherein positions 1, 3, 5, 7, 9, 11, 13, 15, 17, 19 and 21 of each strand are chemically modified (e.g., with compounds having any of Formulae 1-VII, such as such as 2′-deoxy, 2′-deoxy-2′-fluoro, or 2′-O-methyl nucleotides). In another non-limiting example, a double stranded siNA molecule of the invention in which each strand of the siNA is 21 nucleotides in length is featured wherein positions 2, 4, 6, 8, 10, 12, 14, 16, 18, and 20 of each strand are chemically modified (e.g., with compounds having any of Formulae 1-VII, such as such as 2′-deoxy, 2′-deoxy-2′-fluoro, or 2′-O-methyl nucleotides). Such siNA molecules can further comprise terminal cap moieties and/or backbone modifications as described herein.

[0120] In one embodiment, the invention features a method for modulating the expression of an interleukin and/or interleukin receptor gene within a cell comprising: (a) synthesizing a siNA molecule of the invention, which can be chemically-modified, wherein one of the siNA strands comprises a sequence complementary to RNA of the interleukin and/or interleukin receptor gene; and (b) introducing the siNA molecule into a cell under conditions suitable to modulate the expression of the interleukin and/or interleukin receptor gene in the cell.

[0121] In one embodiment, the invention features a method for modulating the expression of an interleukin and/or interleukin receptor gene within a cell comprising: (a) synthesizing a siNA molecule of the invention, which can be chemically-modified, wherein one of the siNA strands comprises a sequence complementary to RNA of the interleukin and/or interleukin receptor gene and wherein the sense strand sequence of the siNA comprises a sequence identical or substantially similar to the sequence of the target RNA; and (b) introducing the siNA molecule into a cell under conditions suitable to modulate the expression of the interleukin and/or interleukin receptor gene in the cell.

[0122] In another embodiment, the invention features a method for modulating the expression of more than one interleukin and/or interleukin receptor gene within a cell comprising: (a) synthesizing siNA molecules of the invention, which can be chemically-modified, wherein one of the siNA strands comprises a sequence complementary to RNA of the interleukin and/or interleukin receptor genes; and (b) introducing the siNA molecules into a cell under conditions suitable to modulate the expression of the interleukin and/or interleukin receptor genes in the cell.

[0123] In another embodiment, the invention features a method for modulating the expression of two or more interleukin and/or interleukin receptor genes within a cell comprising: (a) synthesizing one or more siNA molecules of the invention, which can be chemically-modified, wherein the siNA strands comprise sequences complementary to RNA of the interleukin and/or interleukin receptor genes and wherein the sense strand sequences of the siNAs comprise sequences identical or substantially similar to the sequences of the target RNAs; and (b) introducing the siNA molecules into a cell under conditions suitable to modulate the expression of the interleukin and/or interleukin receptor genes in the cell.

[0124] In another embodiment, the invention features a method for modulating the expression of more than one interleukin and/or interleukin receptor gene within a cell comprising: (a) synthesizing a siNA molecule of the invention, which can be chemically-modified, wherein one of the siNA strands comprises a sequence complementary to RNA of the interleukin and/or interleukin receptor gene and wherein the sense strand sequence of the siNA comprises a sequence identical or substantially similar to the sequences of the target RNAs; and (b) introducing the siNA molecule into a cell under conditions suitable to modulate the expression of the interleukin and/or interleukin receptor genes in the cell.

[0125] In one embodiment, siNA molecules of the invention are used as reagents in ex vivo applications. For example, siNA reagents are introduced into tissue or cells that are transplanted into a subject for therapeutic effect. The cells and/or tissue can be derived from an organism or subject that later receives the explant, or can be derived from another organism or subject prior to transplantation. The siNA molecules can be used to modulate the expression of one or more genes in the cells or tissue, such that the cells or tissue obtain a desired phenotype or are able to perform a function when transplanted in vivo. In one embodiment, certain target cells from a patient are extracted. These extracted cells are contacted with siNAs targeting a specific nucleotide sequence within the cells under conditions suitable for uptake of the siNAs by these cells (e.g. using delivery reagents such as cationic lipids, liposomes and the like or using techniques such as electroporation to facilitate the delivery of siNAs into cells). The cells are then reintroduced back into the same patient or other patients. In one embodiment, the invention features a method of modulating the expression of an interleukin and/or interleukin receptor gene in a tissue explant comprising: (a) synthesizing a siNA molecule of the invention, which can be chemically-modified, wherein one of the siNA strands comprises a sequence complementary to RNA of the interleukin and/or interleukin receptor gene; and (b) introducing the siNA molecule into a cell of the tissue explant derived from a particular organism under conditions suitable to modulate the expression of the interleukin and/or interleukin receptor gene in the tissue explant. In another embodiment, the method further comprises introducing the tissue explant back into the organism the tissue was derived from or into another organism under conditions suitable to modulate the expression of the interleukin and/or interleukin receptor gene in that organism.

[0126] In one embodiment, the invention features a method of modulating the expression of an interleukin and/or interleukin receptor gene in a tissue explant comprising: (a) synthesizing a siNA molecule of the invention, which can be chemically-modified, wherein one of the siNA strands comprises a sequence complementary to RNA of the interleukin and/or interleukin receptor gene and wherein the sense strand sequence of the siNA comprises a sequence identical or substantially similar to the sequence of the target RNA; and (b) introducing the siNA molecule into a cell of the tissue explant derived from a particular organism under conditions suitable to modulate the expression of the interleukin and/or interleukin receptor gene in the tissue explant. In another embodiment, the method further comprises introducing the tissue explant back into the organism the tissue was derived from or into another organism under conditions suitable to modulate the expression of the interleukin and/or interleukin receptor gene in that organism.

[0127] In another embodiment, the invention features a method of modulating the expression of more than one interleukin and/or interleukin receptor gene in a tissue explant comprising: (a) synthesizing siNA molecules of the invention, which can be chemically-modified, wherein one of the siNA strands comprises a sequence complementary to RNA of the interleukin and/or interleukin receptor genes; and (b) introducing the siNA molecules into a cell of the tissue explant derived from a particular organism under conditions suitable to modulate the expression of the interleukin and/or interleukin receptor genes in the tissue explant. In another embodiment, the method further comprises introducing the tissue explant back into the organism the tissue was derived from or into another organism under conditions suitable to modulate the expression of the interleukin and/or interleukin receptor genes in that organism.

[0128] In one embodiment, the invention features a method of modulating the expression of an interleukin and/or interleukin receptor gene in a subject or organism comprising: (a) synthesizing a siNA molecule of the invention, which can be chemically-modified, wherein one of the siNA strands comprises a sequence complementary to RNA of the interleukin and/or interleukin receptor gene; and (b) introducing the siNA molecule into the subject or organism under conditions suitable to modulate the expression of the interleukin and/or interleukin receptor gene in the subject or organism. The level of interleukin and/or interleukin receptor protein or RNA can be determined using various methods well-known in the art.

[0129] In another embodiment, the invention features a method of modulating the expression of more than one interleukin and/or interleukin receptor gene in a subject or organism comprising: (a) synthesizing siNA molecules of the invention, which can be chemically-modified, wherein one of the siNA strands comprises a sequence complementary to RNA of the interleukin and/or interleukin receptor genes; and (b) introducing the siNA molecules into the subject or organism under conditions suitable to modulate the expression of the interleukin and/or interleukin receptor genes in the subject or organism. The level of interleukin and/or interleukin receptor protein or RNA can be determined as is known in the art.

[0130] In one embodiment, the invention features a method for modulating the expression of an interleukin and/or interleukin receptor gene within a cell comprising: (a) synthesizing a siNA molecule of the invention, which can be chemically-modified, wherein the siNA comprises a single stranded sequence having complementarity to RNA of the interleukin and/or interleukin receptor gene; and (b) introducing the siNA molecule into a cell under conditions suitable to modulate the expression of the interleukin and/or interleukin receptor gene in the cell.

[0131] In another embodiment, the invention features a method for modulating the expression of more than one interleukin and/or interleukin receptor gene within a cell comprising: (a) synthesizing siNA molecules of the invention, which can be chemically-modified, wherein the siNA comprises a single stranded sequence having complementarity to RNA of the interleukin and/or interleukin receptor gene; and (b) contacting the cell in vitro or in vivo with the siNA molecule under conditions suitable to modulate the expression of the interleukin and/or interleukin receptor genes in the cell.

[0132] In one embodiment, the invention features a method of modulating the expression of an interleukin and/or interleukin receptor gene in a tissue explant comprising: (a) synthesizing a siNA molecule of the invention, which can be chemically-modified, wherein the siNA comprises a single stranded sequence having complementarity to RNA of the interleukin and/or interleukin receptor gene; and (b) contacting a cell of the tissue explant derived from a particular subject or organism with the siNA molecule under conditions suitable to modulate the expression of the interleukin and/or interleukin receptor gene in the tissue explant. In another embodiment, the method further comprises introducing the tissue explant back into the subject or organism the tissue was derived from or into another subject or organism under conditions suitable to modulate the expression of the interleukin and/or interleukin receptor gene in that subject or organism.

[0133] In another embodiment, the invention features a method of modulating the expression of more than one interleukin and/or interleukin receptor gene in a tissue explant comprising: (a) synthesizing siNA molecules of the invention, which can be chemically-modified, wherein the siNA comprises a single stranded sequence having complementarity to RNA of the interleukin and/or interleukin receptor gene; and (b) introducing the siNA molecules into a cell of the tissue explant derived from a particular subject or organism under conditions suitable to modulate the expression of the interleukin and/or interleukin receptor genes in the tissue explant. In another embodiment, the method further comprises introducing the tissue explant back into the subject or organism the tissue was derived from or into another subject or organism under conditions suitable to modulate the expression of the interleukin and/or interleukin receptor genes in that subject or organism.

[0134] In one embodiment, the invention features a method of modulating the expression of an interleukin and/or interleukin receptor gene in a subject or organism comprising: (a) synthesizing a siNA molecule of the invention, which can be chemically-modified, wherein the siNA comprises a single stranded sequence having complementarity to RNA of the interleukin and/or interleukin receptor gene; and (b) introducing the siNA molecule into the subject or organism under conditions suitable to modulate the expression of the interleukin and/or interleukin receptor gene in the subject or organism.

[0135] In another embodiment, the invention features a method of modulating the expression of more than one interleukin and/or interleukin receptor gene in a subject or organism comprising: (a) synthesizing siNA molecules of the invention, which can be chemically-modified, wherein the siNA comprises a single stranded sequence having complementarity to RNA of the interleukin and/or interleukin receptor gene; and (b) introducing the siNA molecules into the subject or organism under conditions suitable to modulate the expression of the interleukin and/or interleukin receptor genes in the subject or organism.

[0136] In one embodiment, the invention features a method of modulating the expression of an interleukin and/or interleukin receptor gene in a subject or organism comprising contacting the subject or organism with a siNA molecule of the invention under conditions suitable to modulate the expression of the interleukin and/or interleukin receptor gene in the subject or organism.

[0137] In one embodiment, the invention features a method for treating or preventing an inflammatory, disease, disorder, or condition in a subject or organism comprising contacting the subject or organism with a siNA molecule of the invention under conditions suitable to modulate the expression of the interleukin and/or interleukin receptor gene in the subject or organism.

[0138] In one embodiment, the invention features a method for treating or preventing a respiratory, disease, disorder, and/or condition in a subject or organism comprising contacting the subject or organism with a siNA molecule of the invention under conditions suitable to modulate the expression of the interleukin and/or interleukin receptor gene in the subject or organism. In one embodiment, the interleuking or interleukin receptor gene is IL-4, IL-4R, IL-13, and/or IL-13R.

[0139] In one embodiment, the invention features a method for treating or preventing a autoimmune disease, disorder, and/or condition in a subject or organism comprising contacting the subject or organism with a siNA molecule of the invention under conditions suitable to modulate the expression of the interleukin and/or interleukin receptor gene in the subject or organism.

[0140] In one embodiment, the invention features a method for treating or preventing a cardiovascular disease, disorder, and/or condition in a subject or organism comprising contacting the subject or organism with a siNA molecule of the invention under conditions suitable to modulate the expression of the interleukin and/or interleukin receptor gene in the subject or organism.

[0141] In one embodiment, the invention features a method for treating or preventing a neurological disease, disorder, and/or condition in a subject or organism comprising contacting the subject or organism with a siNA molecule of the invention under conditions suitable to modulate the expression of the interleukin and/or interleukin receptor gene in the subject or organism.

[0142] In one embodiment, the invention features a method for treating or preventing a proliferative disease, disorder, and/or condition in a subject or organism comprising contacting the subject or organism with a siNA molecule of the invention under conditions suitable to modulate the expression of the interleukin and/or interleukin receptor gene in the subject or organism.

[0143] In one embodiment, the invention features a method for treating or preventing cancer in a subject or organism comprising contacting the subject or organism with a siNA molecule of the invention under conditions suitable to modulate the expression of the interleukin and/or interleukin receptor gene in the subject or organism.

[0144] In another embodiment, the invention features a method of modulating the expression of more than one interleukin and/or interleukin receptor genes in a subject or organism comprising contacting the subject or organism with one or more siNA molecules of the invention under conditions suitable to modulate the expression of the interleukin and/or interleukin receptor genes in the subject or organism.

[0145] The siNA molecules of the invention can be designed to down regulate or inhibit target (e.g., interleukin and/or interleukin receptor) gene expression through RNAi targeting of a variety of RNA molecules. In one embodiment, the siNA molecules of the invention are used to target various RNAs corresponding to a target gene. Non-limiting examples of such RNAs include messenger RNA (mRNA), alternate RNA splice variants of target gene(s), post-transcriptionally modified RNA of target gene(s), pre-mRNA of target gene(s), and/or RNA templates. If alternate splicing produces a family of transcripts that are distinguished by usage of appropriate exons, the instant invention can be used to inhibit gene expression through the appropriate exons to specifically inhibit or to distinguish among the functions of gene family members. For example, a protein that contains an alternatively spliced transmembrane domain can be expressed in both membrane bound and secreted forms. Use of the invention to target the exon containing the transmembrane domain can be used to determine the functional consequences of pharmaceutical targeting of membrane bound as opposed to the secreted form of the protein. Non-limiting examples of applications of the invention relating to targeting these RNA molecules include therapeutic pharmaceutical applications, pharmaceutical discovery applications, molecular diagnostic and gene function applications, and gene mapping, for example using single nucleotide polymorphism mapping with siNA molecules of the invention. Such applications can be implemented using known gene sequences or from partial sequences available from an expressed sequence tag (EST).

[0146] In another embodiment, the siNA molecules of the invention are used to target conserved sequences corresponding to a gene family or gene families such as interleukin and/or interleukin receptor family genes. As such, siNA molecules targeting multiple interleukin and/or interleukin receptor targets can provide increased therapeutic effect. In addition, siNA can be used to characterize pathways of gene function in a variety of applications. For example, the present invention can be used to inhibit the activity of target gene(s) in a pathway to determine the function of uncharacterized gene(s) in gene function analysis, mRNA function analysis, or translational analysis. The invention can be used to determine potential target gene pathways involved in various diseases and conditions toward pharmaceutical development. The invention can be used to understand pathways of gene expression involved in, for example cancer, inflammatory, respiratory, autoimmune, cardiovascular, neurological, and/or proliferative diseases, disorders and conditions.

[0147] In one embodiment, siNA molecule(s) and/or methods of the invention are used to down regulate the expression of gene(s) that encode RNA referred to by Genbank Accession, for example, interleukin and/or interleukin receptor genes encoding RNA sequence(s) referred to herein by Genbank Accession number, for example, Genbank Accession Nos. shown in Table I.

[0148] In one embodiment, the invention features a method comprising: (a) generating a library of siNA constructs having a predetermined complexity; and (b) assaying the siNA constructs of (a) above, under conditions suitable to determine RNAi target sites within the target RNA sequence. In one embodiment, the siNA molecules of (a) have strands of a fixed length, for example, about 23 nucleotides in length. In another embodiment, the siNA molecules of (a) are of differing length, for example having strands of about 15 to about 30 (e.g., about 15, 16, 17, 18, 19, 20, 21, 22, 23, 24, 25, 26, 27, 28, 29, or 30) nucleotides in length. In one embodiment, the assay can comprise a reconstituted in vitro siNA assay as described herein. In another embodiment, the assay can comprise a cell culture system in which target RNA is expressed. In another embodiment, fragments of target RNA are analyzed for detectable levels of cleavage, for example by gel electrophoresis, northern blot analysis, or RNAse protection assays, to determine the most suitable target site(s) within the target RNA sequence. The target RNA sequence can be obtained as is known in the art, for example, by cloning and/or transcription for in vitro systems, and by cellular expression in in vivo systems.

[0149] In one embodiment, the invention features a method comprising: (a) generating a randomized library of siNA constructs having a predetermined complexity, such as of 4^{N}, where N represents the number of base paired nucleotides in each of the siNA construct strands (eg. for a siNA construct having 21 nucleotide sense and antisense strands with 19 base pairs, the complexity would be 4¹⁹); and (b) assaying the siNA constructs of (a) above, under conditions suitable to determine RNAi target sites within the target interleukin and/or interleukin receptor RNA sequence. In another embodiment, the siNA molecules of (a) have strands of a fixed length, for example about 23 nucleotides in length. In yet another embodiment, the siNA molecules of (a) are of differing length, for example having strands of about 15 to about 30 (e.g., about 15, 16, 17, 18, 19, 20, 21, 22, 23, 24, 25, 26, 27, 28, 29, or 30) nucleotides in length. In one embodiment, the assay can comprise a reconstituted in vitro siNA assay as described in Example 6 herein. In another embodiment, the assay can comprise a cell culture system in which target RNA is expressed. In another embodiment, fragments of interleukin and/or interleukin receptor RNA are analyzed for detectable levels of cleavage, for example, by gel electrophoresis, northern blot analysis, or RNAse protection assays, to determine the most suitable target site(s) within the target interleukin and/or interleukin receptor RNA sequence. The target interleukin and/or interleukin receptor RNA sequence can be obtained as is known in the art, for example, by cloning and/or transcription for in vitro systems, and by cellular expression in in vivo systems.

[0150] In another embodiment, the invention features a method comprising: (a) analyzing the sequence of a RNA target encoded by a target gene; (b) synthesizing one or more sets of siNA molecules having sequence complementary to one or more regions of the RNA of (a); and (c) assaying the siNA molecules of (b) under conditions suitable to determine RNAi targets within the target RNA sequence. In one embodiment, the siNA molecules of (b) have strands of a fixed length, for example about 23 nucleotides in length. In another embodiment, the siNA molecules of (b) are of differing length, for example having strands of about 15 to about 30 (e.g., about 15, 16, 17, 18, 19, 20, 21, 22, 23, 24, 25, 26, 27, 28, 29, or 30) nucleotides in length. In one embodiment, the assay can comprise a reconstituted in vitro siNA assay as described herein. In another embodiment, the assay can comprise a cell culture system in which target RNA is expressed. Fragments of target RNA are analyzed for detectable levels of cleavage, for example by gel electrophoresis, northern blot analysis, or RNAse protection assays, to determine the most suitable target site(s) within the target RNA sequence. The target RNA sequence can be obtained as is known in the art, for example, by cloning and/or transcription for in vitro systems, and by expression in in vivo systems.

[0151] By “target site” is meant a sequence within a target RNA that is “targeted” for cleavage mediated by a siNA construct which contains sequences within its antisense region that are complementary to the target sequence.

[0152] By “detectable level of cleavage” is meant cleavage of target RNA (and formation of cleaved product RNAs) to an extent sufficient to discern cleavage products above the background of RNAs produced by random degradation of the target RNA. Production of cleavage products from 1-5% of the target RNA is sufficient to detect above the background for most methods of detection.

[0153] In one embodiment, the invention features a composition comprising a siNA molecule of the invention, which can be chemically-modified, in a pharmaceutically acceptable carrier or diluent. In another embodiment, the invention features a pharmaceutical composition comprising siNA molecules of the invention, which can be chemically-modified, targeting one or more genes in a pharmaceutically acceptable carrier or diluent. In another embodiment, the invention features a method for diagnosing a disease or condition in a subject comprising administering to the subject a composition of the invention under conditions suitable for the diagnosis of the disease or condition in the subject. In another embodiment, the invention features a method for treating or preventing a disease or condition in a subject, comprising administering to the subject a composition of the invention under conditions suitable for the treatment or prevention of the disease or condition in the subject, alone or in conjunction with one or more other therapeutic compounds. In yet another embodiment, the invention features a method for treating or preventing cancer, inflammatory, respiratory, autoimmune, cardiovascular, neurological, and/or proliferative diseases, disorders and conditions in a subject or organism comprising administering to the subject a composition of the invention under conditions suitable for the treatment or prevention of cancer, inflammatory, respiratory, autoimmune, cardiovascular, neurological, and/or proliferative diseases, disorders and conditions in the subject or organism.

[0154] In another embodiment, the invention features a method for validating an interleukin and/or interleukin receptor gene target, comprising: (a) synthesizing a siNA molecule of the invention, which can be chemically-modified, wherein one of the siNA strands includes a sequence complementary to RNA of an interleukin and/or interleukin receptor target gene; (b) introducing the siNA molecule into a cell, tissue, subject, or organism under conditions suitable for modulating expression of the interleukin and/or interleukin receptor target gene in the cell, tissue, subject, or organism; and (c) determining the function of the gene by assaying for any phenotypic change in the cell, tissue, subject, or organism.

[0155] In another embodiment, the invention features a method for validating an interleukin and/or interleukin receptor target comprising: (a) synthesizing a siNA molecule of the invention, which can be chemically-modified, wherein one of the siNA strands includes a sequence complementary to RNA of an interleukin and/or interleukin receptor target gene; (b) introducing the siNA molecule into a biological system under conditions suitable for modulating expression of the interleukin and/or interleukin receptor target gene in the biological system; and (c) determining the function of the gene by assaying for any phenotypic change in the biological system.

[0156] By “biological system” is meant, material, in a purified or unpurified form, from biological sources, including but not limited to human or animal, wherein the system comprises the components required for RNAi activity. The term “biological system” includes, for example, a cell, tissue, subject, or organism, or extract thereof. The term biological system also includes reconstituted RNAi systems that can be used in an in vitro setting.

[0157] By “phenotypic change” is meant any detectable change to a cell that occurs in response to contact or treatment with a nucleic acid molecule of the invention (e.g., siNA). Such detectable changes include, but are not limited to, changes in shape, size, proliferation, motility, protein expression or RNA expression or other physical or chemical changes as can be assayed by methods known in the art. The detectable change can also include expression of reporter genes/molecules such as Green Florescent Protein (GFP) or various tags that are used to identify an expressed protein or any other cellular component that can be assayed.

[0158] In one embodiment, the invention features a kit containing a siNA molecule of the invention, which can be chemically-modified, that can be used to modulate the expression of an interleukin and/or interleukin receptor target gene in a biological system, including, for example, in a cell, tissue, subject, or organism. In another embodiment, the invention features a kit containing more than one siNA molecule of the invention, which can be chemically-modified, that can be used to modulate the expression of more than one interleukin and/or interleukin receptor target gene in a biological system, including, for example, in a cell, tissue, subject, or organism.

[0159] In one embodiment, the invention features a cell containing one or more siNA molecules of the invention, which can be chemically-modified. In another embodiment, the cell containing a siNA molecule of the invention is a mammalian cell. In yet another embodiment, the cell containing a siNA molecule of the invention is a human cell.

[0160] In one embodiment, the synthesis of a siNA molecule of the invention, which can be chemically-modified, comprises: (a) synthesis of two complementary strands of the siNA molecule; (b) annealing the two complementary strands together under conditions suitable to obtain a double-stranded siNA molecule. In another embodiment, synthesis of the two complementary strands of the siNA molecule is by solid phase oligonucleotide synthesis. In yet another embodiment, synthesis of the two complementary strands of the siNA molecule is by solid phase tandem oligonucleotide synthesis.

[0161] In one embodiment, the invention features a method for synthesizing a siNA duplex molecule comprising: (a) synthesizing a first oligonucleotide sequence strand of the siNA molecule, wherein the first oligonucleotide sequence strand comprises a cleavable linker molecule that can be used as a scaffold for the synthesis of the second oligonucleotide sequence strand of the siNA; (b) synthesizing the second oligonucleotide sequence strand of siNA on the scaffold of the first oligonucleotide sequence strand, wherein the second oligonucleotide sequence strand further comprises a chemical moiety than can be used to purify the siNA duplex; (c) cleaving the linker molecule of (a) under conditions suitable for the two siNA oligonucleotide strands to hybridize and form a stable duplex; and (d) purifying the siNA duplex utilizing the chemical moiety of the second oligonucleotide sequence strand. In one embodiment, cleavage of the linker molecule in (c) above takes place during deprotection of the oligonucleotide, for example, under hydrolysis conditions using an alkylamine base such as methylamine. In one embodiment, the method of synthesis comprises solid phase synthesis on a solid support such as controlled pore glass (CPG) or polystyrene, wherein the first sequence of (a) is synthesized on a cleavable linker, such as a succinyl linker, using the solid support as a scaffold. The cleavable linker in (a) used as a scaffold for synthesizing the second strand can comprise similar reactivity as the solid support derivatized linker, such that cleavage of the solid support derivatized linker and the cleavable linker of (a) takes place concomitantly. In another embodiment, the chemical moiety of (b) that can be used to isolate the attached oligonucleotide sequence comprises a trityl group, for example a dimethoxytrityl group, which can be employed in a trityl-on synthesis strategy as described herein. In yet another embodiment, the chemical moiety, such as a dimethoxytrityl group, is removed during purification, for example, using acidic conditions.

[0162] In a further embodiment, the method for siNA synthesis is a solution phase synthesis or hybrid phase synthesis wherein both strands of the siNA duplex are synthesized in tandem using a cleavable linker attached to the first sequence which acts a scaffold for synthesis of the second sequence. Cleavage of the linker under conditions suitable for hybridization of the separate siNA sequence strands results in formation of the double-stranded siNA molecule.

[0163] In another embodiment, the invention features a method for synthesizing a siNA duplex molecule comprising: (a) synthesizing one oligonucleotide sequence strand of the siNA molecule, wherein the sequence comprises a cleavable linker molecule that can be used as a scaffold for the synthesis of another oligonucleotide sequence; (b) synthesizing a second oligonucleotide sequence having complementarity to the first sequence strand on the scaffold of (a), wherein the second sequence comprises the other strand of the double-stranded siNA molecule and wherein the second sequence further comprises a chemical moiety than can be used to isolate the attached oligonucleotide sequence; (c) purifying the product of (b) utilizing the chemical moiety of the second oligonucleotide sequence strand under conditions suitable for isolating the full-length sequence comprising both siNA oligonucleotide strands connected by the cleavable linker and under conditions suitable for the two siNA oligonucleotide strands to hybridize and form a stable duplex. In one embodiment, cleavage of the linker molecule in (c) above takes place during deprotection of the oligonucleotide, for example, under hydrolysis conditions. In another embodiment, cleavage of the linker molecule in (c) above takes place after deprotection of the oligonucleotide. In another embodiment, the method of synthesis comprises solid phase synthesis on a solid support such as controlled pore glass (CPG) or polystyrene, wherein the first sequence of (a) is synthesized on a cleavable linker, such as a succinyl linker, using the solid support as a scaffold. The cleavable linker in (a) used as a scaffold for synthesizing the second strand can comprise similar reactivity or differing reactivity as the solid support derivatized linker, such that cleavage of the solid support derivatized linker and the cleavable linker of (a) takes place either concomitantly or sequentially. In one embodiment, the chemical moiety of (b) that can be used to isolate the attached oligonucleotide sequence comprises a trityl group, for example a dimethoxytrityl group.

[0164] In another embodiment, the invention features a method for making a double-stranded siNA molecule in a single synthetic process comprising: (a) synthesizing an oligonucleotide having a first and a second sequence, wherein the first sequence is complementary to the second sequence, and the first oligonucleotide sequence is linked to the second sequence via a cleavable linker, and wherein a terminal 5′-protecting group, for example, a 5′-O-dimethoxytrityl group (5′-O-DMT) remains on the oligonucleotide having the second sequence; (b) deprotecting the oligonucleotide whereby the deprotection results in the cleavage of the linker joining the two oligonucleotide sequences; and (c) purifying the product of (b) under conditions suitable for isolating the double-stranded siNA molecule, for example using a trityl-on synthesis strategy as described herein.

[0165] In another embodiment, the method of synthesis of siNA molecules of the invention comprises the teachings of Scaringe et al., U.S. Pat. Nos. 5,889,136; 6,008,400; and 6,111,086, incorporated by reference herein in their entirety.

[0166] In one embodiment, the invention features siNA constructs that mediate RNAi against interleukin and/or interleukin receptor, wherein the siNA construct comprises one or more chemical modifications, for example, one or more chemical modifications having any of Formulae I-VII or any combination thereof that increases the nuclease resistance of the siNA construct.

[0167] In another embodiment, the invention features a method for generating siNA molecules with increased nuclease resistance comprising (a) introducing nucleotides having any of Formula I-VII or any combination thereof into a siNA molecule, and (b) assaying the siNA molecule of step (a) under conditions suitable for isolating siNA molecules having increased nuclease resistance.

[0168] In another embodiment, the invention features a method for generating siNA molecules with improved toxicologic profiles (e.g., have attenuated or no immunstimulatory properties) comprising (a) introducing nucleotides having any of Formula I-VII (e.g., siNA motifs referred to in Table IV) or any combination thereof into a siNA molecule, and (b) assaying the siNA molecule of step (a) under conditions suitable for isolating siNA molecules having improved toxicologic profiles.

[0169] In another embodiment, the invention features a method for generating siNA molecules that do not stimulate an interferon response (e.g., no interferon response or attenuated interferon response) in a cell, subject, or organism, comprising (a) introducing nucleotides having any of Formula I-VII (e.g., siNA motifs referred to in Table IV) or any combination thereof into a siNA molecule, and (b) assaying the siNA molecule of step (a) under conditions suitable for isolating siNA molecules that do not stimulate an interferon response.

[0170] By “improved toxicologic profile”, is meant that the chemically modified siNA construct exhibits decreased toxicity in a cell, subject, or organism compared to an unmodified siNA or siNA molecule hving fewer modifications or modifications that are less effective in imparting improved toxicology. In a non-limiting example, siNA molecules with improved toxicologic profiles are associated with a decreased or attenuated immunostimulatory response in a cell, subject, or organism compared to an unmodified siNA or siNA molecule having fewer modifications or modifications that are less effective in imparting improved toxicology. In one embodiment, a siNA molecule with an improved toxicological profile comprises no ribonucleotides. In one embodiment, a siNA molecule with an improved toxicological profile comprises less than 5 ribonucleotides (e.g., 1, 2, 3, or 4 ribonucleotides). In one embodiment, a siNA molecule with an improved toxicological profile comprises Stab 7, Stab 8, Stab 11, Stab 12, Stab 13, Stab 16, Stab 17, Stab 18, Stab 19, Stab 20, Stab 23, Stab 24, Stab 25, Stab 26, Stab 27, Stab 28, Stab 29, Stab 30, Stab 31, Stab 32 or any combination thereof (see Table IV). In one embodiment, the level of immunostimulatory response associated with a given siNA molecule can be measured as is known in the art, for example by determining the level of PKR/interferon response, proliferation, B-cell activation, and/or cytokine production in assays to quantitate the immunostimulatory response of particular siNA molecules (see, for example, Leifer et al., 2003, J Immunother. 26, 313-9; and U.S. Pat. No. 5,968,909, incorporated in its entirety by reference).

[0171] In one embodiment, the invention features siNA constructs that mediate RNAi against interleukin and/or interleukin receptor, wherein the siNA construct comprises one or more chemical modifications described herein that modulates the binding affinity between the sense and antisense strands of the siNA construct.

[0172] In another embodiment, the invention features a method for generating siNA molecules with increased binding affinity between the sense and antisense strands of the siNA molecule comprising (a) introducing nucleotides having any of Formula I-VII or any combination thereof into a siNA molecule, and (b) assaying the siNA molecule of step (a) under conditions suitable for isolating siNA molecules having increased binding affinity between the sense and antisense strands of the siNA molecule.

[0173] In one embodiment, the invention features siNA constructs that mediate RNAi against interleukin and/or interleukin receptor, wherein the siNA construct comprises one or more chemical modifications described herein that modulates the binding affinity between the antisense strand of the siNA construct and a complementary target RNA sequence within a cell.

[0174] In one embodiment, the invention features siNA constructs that mediate RNAi against interleukin and/or interleukin receptor, wherein the siNA construct comprises one or more chemical modifications described herein that modulates the binding affinity between the antisense strand of the siNA construct and a complementary target DNA sequence within a cell.

[0175] In another embodiment, the invention features a method for generating siNA molecules with increased binding affinity between the antisense strand of the siNA molecule and a complementary target RNA sequence comprising (a) introducing nucleotides having any of Formula I-VII or any combination thereof into a siNA molecule, and (b) assaying the siNA molecule of step (a) under conditions suitable for isolating siNA molecules having increased binding affinity between the antisense strand of the siNA molecule and a complementary target RNA sequence.

[0176] In another embodiment, the invention features a method for generating siNA molecules with increased binding affinity between the antisense strand of the siNA molecule and a complementary target DNA sequence comprising (a) introducing nucleotides having any of Formula I-VII or any combination thereof into a siNA molecule, and (b) assaying the siNA molecule of step (a) under conditions suitable for isolating siNA molecules having increased binding affinity between the antisense strand of the siNA molecule and a complementary target DNA sequence.

[0177] In one embodiment, the invention features siNA constructs that mediate RNAi against interleukin and/or interleukin receptor, wherein the siNA construct comprises one or more chemical modifications described herein that modulate the polymerase activity of a cellular polymerase capable of generating additional endogenous siNA molecules having sequence homology to the chemically-modified siNA construct.

[0178] In another embodiment, the invention features a method for generating siNA molecules capable of mediating increased polymerase activity of a cellular polymerase capable of generating additional endogenous siNA molecules having sequence homology to a chemically-modified siNA molecule comprising (a) introducing nucleotides having any of Formula I-VII or any combination thereof into a siNA molecule, and (b) assaying the siNA molecule of step (a) under conditions suitable for isolating siNA molecules capable of mediating increased polymerase activity of a cellular polymerase capable of generating additional endogenous siNA molecules having sequence homology to the chemically-modified siNA molecule.

[0179] In one embodiment, the invention features chemically-modified siNA constructs that mediate RNAi against interleukin and/or interleukin receptor in a cell, wherein the chemical modifications do not significantly effect the interaction of siNA with a target RNA molecule, DNA molecule and/or proteins or other factors that are essential for RNAi in a manner that would decrease the efficacy of RNAi mediated by such siNA constructs.

[0180] In another embodiment, the invention features a method for generating siNA molecules with improved RNAi activity against interleukin and/or interleukin receptor comprising (a) introducing nucleotides having any of Formula I-VII or any combination thereof into a siNA molecule, and (b) assaying the siNA molecule of step (a) under conditions suitable for isolating siNA molecules having improved RNAi activity.

[0181] In yet another embodiment, the invention features a method for generating siNA molecules with improved RNAi activity against interleukin and/or interleukin receptor target RNA comprising (a) introducing nucleotides having any of Formula I-VII or any combination thereof into a siNA molecule, and (b) assaying the siNA molecule of step (a) under conditions suitable for isolating siNA molecules having improved RNAi activity against the target RNA.

[0182] In yet another embodiment, the invention features a method for generating siNA molecules with improved RNAi activity against interleukin and/or interleukin receptor target DNA comprising (a) introducing nucleotides having any of Formula I-VII or any combination thereof into a siNA molecule, and (b) assaying the siNA molecule of step (a) under conditions suitable for isolating siNA molecules having improved RNAi activity against the target DNA.

[0183] In one embodiment, the invention features siNA constructs that mediate RNAi against interleukin and/or interleukin receptor, wherein the siNA construct comprises one or more chemical modifications described herein that modulates the cellular uptake of the siNA construct.

[0184] In another embodiment, the invention features a method for generating siNA molecules against interleukin and/or interleukin receptor with improved cellular uptake comprising (a) introducing nucleotides having any of Formula I-VII or any combination thereof into a siNA molecule, and (b) assaying the siNA molecule of step (a) under conditions suitable for isolating siNA molecules having improved cellular uptake.

[0185] In one embodiment, the invention features siNA constructs that mediate RNAi against interleukin and/or interleukin receptor, wherein the siNA construct comprises one or more chemical modifications described herein that increases the bioavailability of the siNA construct, for example, by attaching polymeric conjugates such as polyethyleneglycol or equivalent conjugates that improve the pharmacokinetics of the siNA construct, or by attaching conjugates that target specific tissue types or cell types in vivo. Non-limiting examples of such conjugates are described in Vargeese et al., U.S. Ser. No. 10/201,394 incorporated by reference herein.

[0186] In one embodiment, the invention features a method for generating siNA molecules of the invention with improved bioavailability comprising (a) introducing a conjugate into the structure of a siNA molecule, and (b) assaying the siNA molecule of step (a) under conditions suitable for isolating siNA molecules having improved bioavailability. Such conjugates can include ligands for cellular receptors, such as peptides derived from naturally occurring protein ligands; protein localization sequences, including cellular ZIP code sequences; antibodies; nucleic acid aptamers; vitamins and other co-factors, such as folate and N-acetylgalactosamine; polymers, such as polyethyleneglycol (PEG); phospholipids; cholesterol; polyamines, such as spermine or spermidine; and others.

[0187] In one embodiment, the invention features a double stranded short interfering nucleic acid (siNA) molecule that comprises a first nucleotide sequence complementary to a target RNA sequence or a portion thereof, and a second sequence having complementarity to said first sequence, wherein said second sequence is chemically modified in a manner that it can no longer act as a guide sequence for efficiently mediating RNA interference and/or be recognized by cellular proteins that facilitate RNAi.

[0188] In one embodiment, the invention features a double stranded short interfering nucleic acid (siNA) molecule that comprises a first nucleotide sequence complementary to a target RNA sequence or a portion thereof, and a second sequence having complementarity to said first sequence, wherein the second sequence is designed or modified in a manner that prevents its entry into the RNAi pathway as a guide sequence or as a sequence that is complementary to a target nucleic acid (e.g., RNA) sequence. Such design or modifications are expected to enhance the activity of siNA and/or improve the specificity of siNA molecules of the invention. These modifications are also expected to minimize any off-target effects and/or associated toxicity.

[0189] In one embodiment, the invention features a double stranded short interfering nucleic acid (siNA) molecule that comprises a first nucleotide sequence complementary to a target RNA sequence or a portion thereof, and a second sequence having complementarity to said first sequence, wherein said second sequence is incapable of acting as a guide sequence for mediating RNA interference.

[0190] In one embodiment, the invention features a double stranded short interfering nucleic acid (siNA) molecule that comprises a first nucleotide sequence complementary to a target RNA sequence or a portion thereof, and a second sequence having complementarity to said first sequence, wherein said second sequence does not have a terminal 5′-hydroxyl (5′-OH) or 5′-phosphate group.

[0191] In one embodiment, the invention features a double stranded short interfering nucleic acid (siNA) molecule that comprises a first nucleotide sequence complementary to a target RNA sequence or a portion thereof, and a second sequence having complementarity to said first sequence, wherein said second sequence comprises a terminal cap moiety at the 5′-end of said second sequence. In one embodiment, the terminal cap moiety comprises an inverted abasic, inverted deoxy abasic, inverted nucleotide moiety, a group shown in FIG. 10, an alkyl or cycloalkyl group, a heterocycle, or any other group that prevents RNAi activity in which the second sequence serves as a guide sequence or template for RNAi.

[0192] In one embodiment, the invention features a double stranded short interfering nucleic acid (siNA) molecule that comprises a first nucleotide sequence complementary to a target RNA sequence or a portion thereof, and a second sequence having complementarity to said first sequence, wherein said second sequence comprises a terminal cap moiety at the 5′-end and 3′-end of said second sequence. In one embodiment, each terminal cap moiety individually comprises an inverted abasic, inverted deoxy abasic, inverted nucleotide moiety, a group shown in FIG. 10, an alkyl or cycloalkyl group, a heterocycle, or any other group that prevents RNAi activity in which the second sequence serves as a guide sequence or template for RNAi.

[0193] In one embodiment, the invention features a method for generating siNA molecules of the invention with improved specificity for down regulating or inhibiting the expression of a target nucleic acid (e.g., a DNA or RNA such as a gene or its corresponding RNA), comprising (a) introducing one or more chemical modifications into the structure of a siNA molecule, and (b) assaying the siNA molecule of step (a) under conditions suitable for isolating siNA molecules having improved specificity. In another embodiment, the chemical modification used to improve specificity comprises terminal cap modifications at the 5′-end, 3′-end, or both 5′ and 3′-ends of the siNA molecule. The terminal cap modifications can comprise, for example, structures shown in FIG. 10 (e.g. inverted deoxyabasic moieties) or any other chemical modification that renders a portion of the siNA molecule (e.g. the sense strand) incapable of mediating RNA interference against an off target nucleic acid sequence. In a non-limiting example, a siNA molecule is designed such that only the antisense sequence of the siNA molecule can serve as a guide sequence for RISC mediated degradation of a corresponding target RNA sequence. This can be accomplished by rendering the sense sequence of the siNA inactive by introducing chemical modifications to the sense strand that preclude recognition of the sense strand as a guide sequence by RNAi machinery. In one embodiment, such chemical modifications comprise any chemical group at the 5′-end of the sense strand of the siNA, or any other group that serves to render the sense strand inactive as a guide sequence for mediating RNA interference. These modifications, for example, can result in a molecule where the 5′-end of the sense strand no longer has a free 5′-hydroxyl (5′-OH) or a free 5′-phosphate group (e.g., phosphate, diphosphate, triphosphate, cyclic phosphate etc.). Non-limiting examples of such siNA constructs are described herein, such as “Stab 9/10”, “Stab 7/8”, “Stab 7/19”, “Stab 17/22”, “Stab 23/24”, “Stab 24/25”, and “Stab 24/26” (e.g., any siNA having Stab 7, 9, 17, 23, or 24 sense strands) chemistries and variants thereof (see Table IV) wherein the 5′-end and 3′-end of the sense strand of the siNA do not comprise a hydroxyl group or phosphate group.

[0194] In one embodiment, the invention features a method for generating siNA molecules of the invention with improved specificity for down regulating or inhibiting the expression of a target nucleic acid (e.g., a DNA or RNA such as a gene or its corresponding RNA), comprising introducing one or more chemical modifications into the structure of a siNA molecule that prevent a strand or portion of the siNA molecule from acting as a template or guide sequence for RNAi activity. In one embodiment, the inactive strand or sense region of the siNA molecule is the sense strand or sense region of the siNA molecule, i.e. the strand or region of the siNA that does not have complementarity to the target nucleic acid sequence. In one embodiment, such chemical modifications comprise any chemical group at the 5′-end of the sense strand or region of the siNA that does not comprise a 5′-hydroxyl (5′-OH) or 5′-phosphate group, or any other group that serves to render the sense strand or sense region inactive as a guide sequence for mediating RNA interference. Non-limiting examples of such siNA constructs are described herein, such as “Stab 9/10”, “Stab 7/8”, “Stab 7/19”, “Stab 17/22”, “Stab 23/24”, “Stab 24/25”, and “Stab 24/26” (e.g., any siNA having Stab 7, 9, 17, 23, or 24 sense strands) chemistries and variants thereof (see Table IV) wherein the 5′-end and 3′-end of the sense strand of the siNA do not comprise a hydroxyl group or phosphate group.

[0195] In one embodiment, the invention features a method for screening siNA molecules that are active in mediating RNA interference against a target nucleic acid sequence comprising (a) generating a plurality of unmodified siNA molecules, (b) screening the siNA molecules of step (a) under conditions suitable for isolating siNA molecules that are active in mediating RNA interference against the target nucleic acid sequence, and (c) introducing chemical modifications (e.g. chemical modifications as described herein or as otherwise known in the art) into the active siNA molecules of (b). In one embodiment, the method further comprises re-screening the chemically modified siNA molecules of step (c) under conditions suitable for isolating chemically modified siNA molecules that are active in mediating RNA interference against the target nucleic acid sequence.

[0196] In one embodiment, the invention features a method for screening chemically modified siNA molecules that are active in mediating RNA interference against a target nucleic acid sequence comprising (a) generating a plurality of chemically modified siNA molecules (e.g. siNA molecules as described herein or as otherwise known in the art), and (b) screening the siNA molecules of step (a) under conditions suitable for isolating chemically modified siNA molecules that are active in mediating RNA interference against the target nucleic acid sequence.

[0197] The term “ligand” refers to any compound or molecule, such as a drug, peptide, hormone, or neurotransmitter, that is capable of interacting with another compound, such as a receptor, either directly or indirectly. The receptor that interacts with a ligand can be present on the surface of a cell or can alternately be an intercullular receptor. Interaction of the ligand with the receptor can result in a biochemical reaction, or can simply be a physical interaction or association.

[0198] In another embodiment, the invention features a method for generating siNA molecules of the invention with improved bioavailability comprising (a) introducing an excipient formulation to a siNA molecule, and (b) assaying the siNA molecule of step (a) under conditions suitable for isolating siNA molecules having improved bioavailability. Such excipients include polymers such as cyclodextrins, lipids, cationic lipids, polyamines, phospholipids, nanoparticles, receptors, ligands, and others.

[0199] In another embodiment, the invention features a method for generating siNA molecules of the invention with improved bioavailability comprising (a) introducing nucleotides having any of Formulae I-VII or any combination thereof into a siNA molecule, and (b) assaying the siNA molecule of step (a) under conditions suitable for isolating siNA molecules having improved bioavailability.

[0200] In another embodiment, polyethylene glycol (PEG) can be covalently attached to siNA compounds of the present invention. The attached PEG can be any molecular weight, preferably from about 2,000 to about 50,000 daltons (Da).

[0201] The present invention can be used alone or as a component of a kit having at least one of the reagents necessary to carry out the in vitro or in vivo introduction of RNA to test samples and/or subjects. For example, preferred components of the kit include a siNA molecule of the invention and a vehicle that promotes introduction of the siNA into cells of interest as described herein (e.g., using lipids and other methods of transfection known in the art, see for example Beigelman et al, U.S. Pat. No. 6,395,713). The kit can be used for target validation, such as in determining gene function and/or activity, or in drug optimization, and in drug discovery (see for example Usman et al., U.S. Ser. No. 60/402,996). Such a kit can also include instructions to allow a user of the kit to practice the invention.

[0202] The term “short interfering nucleic acid”, “siNA”, “short interfering RNA”, “siRNA”, “short interfering nucleic acid molecule”, “short interfering oligonucleotide molecule”, or “chemically-modified short interfering nucleic acid molecule” as used herein refers to any nucleic acid molecule capable of inhibiting or down regulating gene expression or viral replication, for example by mediating RNA interference “RNAi” or gene silencing in a sequence-specific manner; see for example Zamore et al., 2000, Cell, 101, 25-33; Bass, 2001, Nature, 411, 428-429; Elbashir et al., 2001, Nature, 411, 494-498; and Kreutzer et al., International PCT Publication No. WO 00/44895; Zernicka-Goetz et al., International PCT Publication No. WO 01/36646; Fire, International PCT Publication No. WO 99/32619; Plaetinck et al., International PCT Publication No. WO 00/01846; Mello and Fire, International PCT Publication No. WO 01/29058; Deschamps-Depaillette, International PCT Publication No. WO 99/07409; and Li et al., International PCT Publication No. WO 00/44914; Allshire, 2002, Science, 297, 1818-1819; Volpe et al., 2002, Science, 297, 1833-1837; Jenuwein, 2002, Science, 297, 2215-2218; and Hall et al., 2002, Science, 297, 2232-2237; Hutvagner and Zamore, 2002, Science, 297, 2056-60; McManus et al., 2002, RNA, 8, 842-850; Reinhart et al., 2002, Gene & Dev., 16, 1616-1626; and Reinhart & Bartel, 2002, Science, 297, 1831). Non limiting examples of siNA molecules of the invention are shown in FIGS. 4-6, and Tables II and III herein. For example the siNA can be a double-stranded polynucleotide molecule comprising self-complementary sense and antisense regions, wherein the antisense region comprises nucleotide sequence that is complementary to nucleotide sequence in a target nucleic acid molecule or a portion thereof and the sense region having nucleotide sequence corresponding to the target nucleic acid sequence or a portion thereof. The siNA can be assembled from two separate oligonucleotides, where one strand is the sense strand and the other is the antisense strand, wherein the antisense and sense strands are self-complementary (i.e. each strand comprises nucleotide sequence that is complementary to nucleotide sequence in the other strand; such as where the antisense strand and sense strand form a duplex or double stranded structure, for example wherein the double stranded region is about 15 to about 30, e.g., about 15, 16, 17, 18, 19, 20, 21, 22, 23, 24, 25, 26, 27, 28, 29 or 30 base pairs; the antisense strand comprises nucleotide sequence that is complementary to nucleotide sequence in a target nucleic acid molecule or a portion thereof and the sense strand comprises nucleotide sequence corresponding to the target nucleic acid sequence or a portion thereof (e.g., about 15 to about 25 or more nucleotides of the siNA molecule are complementary to the target nucleic acid or a portion thereof). Alternatively, the siNA is assembled from a single oligonucleotide, where the self-complementary sense and antisense regions of the siNA are linked by means of a nucleic acid based or non-nucleic acid-based linker(s). The siNA can be a polynucleotide with a duplex, asymmetric duplex, hairpin or asymmetric hairpin secondary structure, having self-complementary sense and antisense regions, wherein the antisense region comprises nucleotide sequence that is complementary to nucleotide sequence in a separate target nucleic acid molecule or a portion thereof and the sense region having nucleotide sequence corresponding to the target nucleic acid sequence or a portion thereof. The siNA can be a circular single-stranded polynucleotide having two or more loop structures and a stem comprising self-complementary sense and antisense regions, wherein the antisense region comprises nucleotide sequence that is complementary to nucleotide sequence in a target nucleic acid molecule or a portion thereof and the sense region having nucleotide sequence corresponding to the target nucleic acid sequence or a portion thereof, and wherein the circular polynucleotide can be processed either in vivo or in vitro to generate an active siNA molecule capable of mediating RNAi. The siNA can also comprise a single stranded polynucleotide having nucleotide sequence complementary to nucleotide sequence in a target nucleic acid molecule or a portion thereof (for example, where such siNA molecule does not require the presence within the siNA molecule of nucleotide sequence corresponding to the target nucleic acid sequence or a portion thereof), wherein the single stranded polynucleotide can further comprise a terminal phosphate group, such as a 5′-phosphate (see for example Martinez et al., 2002, Cell., 110, 563-574 and Schwarz et al., 2002, Molecular Cell, 10, 537-568), or 5′,3′-diphosphate. In certain embodiments, the siNA molecule of the invention comprises separate sense and antisense sequences or regions, wherein the sense and antisense regions are covalently linked by nucleotide or non-nucleotide linkers molecules as is known in the art, or are alternately non-covalently linked by ionic interactions, hydrogen bonding, van der waals interactions, hydrophobic interactions, and/or stacking interactions. In certain embodiments, the siNA molecules of the invention comprise nucleotide sequence that is complementary to nucleotide sequence of a target gene. In another embodiment, the siNA molecule of the invention interacts with nucleotide sequence of a target gene in a manner that causes inhibition of expression of the target gene. As used herein, siNA molecules need not be limited to those molecules containing only RNA, but further encompasses chemically-modified nucleotides and non-nucleotides. In certain embodiments, the short interfering nucleic acid molecules of the invention lack 2′-hydroxy (2′-OH) containing nucleotides. Applicant describes in certain embodiments short interfering nucleic acids that do not require the presence of nucleotides having a 2′-hydroxy group for mediating RNAi and as such, short interfering nucleic acid molecules of the invention optionally do not include any ribonucleotides (e.g., nucleotides having a 2′-OH group). Such siNA molecules that do not require the presence of ribonucleotides within the siNA molecule to support RNAi can however have an attached linker or linkers or other attached or associated groups, moieties, or chains containing one or more nucleotides with 2′-OH groups. Optionally, siNA molecules can comprise ribonucleotides at about 5, 10, 20, 30, 40, or 50% of the nucleotide positions. The modified short interfering nucleic acid molecules of the invention can also be referred to as short interfering modified oligonucleotides “siMON.” As used herein, the term siNA is meant to be equivalent to other terms used to describe nucleic acid molecules that are capable of mediating sequence specific RNAi, for example short interfering RNA (siRNA), double-stranded RNA (dsRNA), micro-RNA (mRNA), short hairpin RNA (shRNA), short interfering oligonucleotide, short interfering nucleic acid, short interfering modified oligonucleotide, chemically-modified siRNA, post-transcriptional gene silencing RNA (ptgsRNA), and others. In addition, as used herein, the term RNAi is meant to be equivalent to other terms used to describe sequence specific RNA interference, such as post transcriptional gene silencing, translational inhibition, or epigenetics. For example, siNA molecules of the invention can be used to epigenetically silence genes at both the post-transcriptional level or the pre-transcriptional level. In a non-limiting example, epigenetic regulation of gene expression by siNA molecules of the invention can result from siNA mediated modification of chromatin structure or methylation pattern to alter gene expression (see, for example, Verdel et al., 2004, Science, 303, 672-676; Pal-Bhadra et al., 2004, Science, 303, 669-672; Allshire, 2002, Science, 297, 1818-1819; Volpe et al., 2002, Science, 297, 1833-1837; Jenuwein, 2002, Science, 297, 2215-2218; and Hall et al., 2002, Science, 297, 2232-2237).

[0203] In one embodiment, a siNA molecule of the invention is a duplex forming oligonucleotide “DFO”, (see for example FIGS. 14-15 and Vaish et al., U.S. Ser. No. 10/727,780 filed Dec. 3, 2003 and International PCT Application No. U.S.04/16390, filed May 24, 2004).

[0204] In one embodiment, a siNA molecule of the invention is a multifunctional siNA, (see for example FIGS. 16-21 and Jadhav et al., U.S. Ser. No. 60/543,480 filed Feb. 10, 2004 and International PCT Application No. U.S.04/16390, filed May 24, 2004). The multifunctional siNA of the invention can comprise sequence targeting, for example, two regions of interleukin and/or interleukin receptor RNA (see for example target sequences in Tables II and III).

[0205] By “asymmetric hairpin” as used herein is meant a linear siNA molecule comprising an antisense region, a loop portion that can comprise nucleotides or non-nucleotides, and a sense region that comprises fewer nucleotides than the antisense region to the extent that the sense region has enough complementary nucleotides to base pair with the antisense region and form a duplex with loop. For example, an asymmetric hairpin siNA molecule of the invention can comprise an antisense region having length sufficient to mediate RNAi in a cell or in vitro system (e.g. about 15 to about 30, or about 15, 16, 17, 18, 19, 20, 21, 22, 23, 24, 25, 26, 27, 28, 29, or 30 nucleotides) and a loop region comprising about 4 to about 12 (e.g., about 4, 5, 6, 7, 8, 9, 10, 11, or 12) nucleotides, and a sense region having about 3 to about 25 (e.g., about 3, 4, 5, 6, 7, 8, 9, 10, 11, 12, 13, 14, 15, 16, 17, 18, 19, 20, 21, 22, 23, 24, or 25) nucleotides that are complementary to the antisense region. The asymmetric hairpin siNA molecule can also comprise a 5′-terminal phosphate group that can be chemically modified. The loop portion of the asymmetric hairpin siNA molecule can comprise nucleotides, non-nucleotides, linker molecules, or conjugate molecules as described herein.

[0206] By “asymmetric duplex” as used herein is meant a siNA molecule having two separate strands comprising a sense region and an antisense region, wherein the sense region comprises fewer nucleotides than the antisense region to the extent that the sense region has enough complementary nucleotides to base pair with the antisense region and form a duplex. For example, an asymmetric duplex siNA molecule of the invention can comprise an antisense region having length sufficient to mediate RNAi in a cell or in vitro system (e.g. about 15 to about 30, or about 15, 16, 17, 18, 19, 20, 21, 22, 23, 24, 25, 26, 27, 28, 29, or 30 nucleotides) and a sense region having about 3 to about 25 (e.g., about 3, 4, 5, 6, 7, 8, 9, 10, 11, 12, 13, 14, 15, 16, 17, 18, 19, 20, 21, 22, 23, 24, or 25) nucleotides that are complementary to the antisense region.

[0207] By “modulate” is meant that the expression of the gene, or level of RNA molecule or equivalent RNA molecules encoding one or more proteins or protein subunits, or activity of one or more proteins or protein subunits is up regulated or down regulated, such that expression, level, or activity is greater than or less than that observed in the absence of the modulator. For example, the term “modulate” can mean “inhibit,” but the use of the word “modulate” is not limited to this definition.

[0208] By “inhibit”, “down-regulate”, or “reduce”, it is meant that the expression of the gene, or level of RNA molecules or equivalent RNA molecules encoding one or more proteins or protein subunits, or activity of one or more proteins or protein subunits, is reduced below that observed in the absence of the nucleic acid molecules (e.g., siNA) of the invention. In one embodiment, inhibition, down-regulation or reduction with an siNA molecule is below that level observed in the presence of an inactive or attenuated molecule. In another embodiment, inhibition, down-regulation, or reduction with siNA molecules is below that level observed in the presence of, for example, an siNA molecule with scrambled sequence or with mismatches. In another embodiment, inhibition, down-regulation, or reduction of gene expression with a nucleic acid molecule of the instant invention is greater in the presence of the nucleic acid molecule than in its absence. In one embodiment, inhibition, down regulation, or reduction of gene expression is associated with post transcriptional silencing, such as RNAi mediated cleavage of a target nucleic acid molecule (e.g. RNA) or inhibition of translation. In one embodiment, inhibition, down regulation, or reduction of gene expression is associated with pretranscriptional silencing.

[0209] By “gene”, or “target gene”, is meant a nucleic acid that encodes an RNA, for example, nucleic acid sequences including, but not limited to, structural genes encoding a polypeptide. A gene or target gene can also encode a functional RNA (fRNA) or non-coding RNA (ncRNA), such as small temporal RNA (stRNA), micro RNA (mRNA), small nuclear RNA (snRNA), short interfering RNA (siRNA), small nucleolar RNA (snRNA), ribosomal RNA (rRNA), transfer RNA (tRNA) and precursor RNAs thereof. Such non-coding RNAs can serve as target nucleic acid molecules for siNA mediated RNA interference in modulating the activity of fRNA or ncRNA involved in functional or regulatory cellular processes. Abberant fRNA or ncRNA activity leading to disease can therefore be modulated by siNA molecules of the invention. siNA molecules targeting fRNA and ncRNA can also be used to manipulate or alter the genotype or phenotype of a subject, organism or cell, by intervening in cellular processes such as genetic imprinting, transcription, translation, or nucleic acid processing (e.g., transamination, methylation etc.). The target gene can be a gene derived from a cell, an endogenous gene, a transgene, or exogenous genes such as genes of a pathogen, for example a virus, which is present in the cell after infection thereof. The cell containing the target gene can be derived from or contained in any organism, for example a plant, animal, protozoan, virus, bacterium, or fungus. Non-limiting examples of plants include monocots, dicots, or gymnosperms. Non-limiting examples of animals include vertebrates or invertebrates. Non-limiting examples of fungi include molds or yeasts. For a review, see for example Snyder and Gerstein, 2003, Science, 300, 258-260.

[0210] By “non-canonical base pair” is meant any non-Watson Crick base pair, such as mismatches and/or wobble base pairs, inlcuding flipped mismatches, single hydrogen bond mismatches, trans-type mismatches, triple base interactions, and quadruple base interactions. Non-limiting examples of such non-canonical base pairs include, but are not limited to, AC reverse Hoogsteen, AC wobble, AU reverse Hoogsteen, GU wobble, AA N7 amino, CC 2-carbonyl-amino(H1)-N-3-amino(H2), GA sheared, UC 4-carbonyl-amino, UU imino-carbonyl, AC reverse wobble, AU Hoogsteen, AU reverse Watson Crick, CG reverse Watson Crick, GC N3-amino-amino N3, AA N1-amino symmetric, AA N7-amino symmetric, GA N7-N1 amino-carbonyl, GA+ carbonyl-amino N7-N1, GG N1-carbonyl symmetric, GG N3-amino symmetric, CC carbonyl-amino symmetric, CC N3-amino symmetric, UU 2-carbonyl-imino symmetric, UU 4-carbonyl-imino symmetric, AA amino-N3, AA N1-amino, AC amino 2-carbonyl, AC N3-amino, AC N7-amino, AU amino-4-carbonyl, AU N1-imino, AU N3-imino, AU N7-imino, CC carbonyl-amino, GA amino-N1, GA amino-N7, GA carbonyl-amino, GA N3-amino, GC amino-N3, GC carbonyl-amino, GC N3-amino, GC N7-amino, GG amino-N7, GG carbonyl-imino, GG N7-amino, GU amino-2-carbonyl, GU carbonyl-imino, GU imino-2-carbonyl, GU N7-imino, psiU imino-2-carbonyl, UC 4-carbonyl-amino, UC imino-carbonyl, UU imino-4-carbonyl, AC C2-H-N3, GA carbonyl-C2-H, UU imino-4-carbonyl 2 carbonyl-C5-H, AC amino(A) N3(C)-carbonyl, GC imino amino-carbonyl, Gpsi imino-2-carbonyl amino-2-carbonyl, and GU imino amino-2-carbonyl base pairs.

[0211] By “interleukin” is meant, any interleukin (e.g., IL-1, IL-2, IL-3, IL-4, IL-5, IL-6, IL-7, IL-8, IL-9, IL-10, IL-11, IL-12, IL-13, IL-14, IL-15, IL-16, IL-17, IL-18, IL-19, IL-20, IL-21, IL-22, IL-23, IL-24, IL-25, IL-26, and IL-27) protein, peptide, or polypeptide having any interleukin activity, such as encoded by interleukin Genbank Accession Nos. shown in Table I. The term interleukin also refers to nucleic acid sequences encoding any interleukin protein, peptide, or polypeptide having interleukin activity. The term “interleukin” is also meant to include other interleukin encoding sequence, such as other interleukin isoforms, mutant interleukin genes, splice variants of interleukin genes, and interleukin gene polymorphisms.

[0212] By “interleukin receptor” is meant, any interleukin receptor (e.g., IL-1R, IL-2R, IL-3R, IL-4R, IL-5R, IL-6R, IL-7R, IL-8R, IL-9R, IL-10R, IL-11R, IL-12R, IL-13R, IL-14R, IL-15R, IL-16R, IL-17R, IL-18R, IL-19R, IL-20R, IL-21R, IL-22R, IL-23R, IL-24R, IL-25R, IL-26R, and IL-27R) protein, peptide, or polypeptide having any interleukin receptor activity, such as encoded by interleukin receptor Genbank Accession Nos. shown in Table I. The term interleukin receptor also refers to nucleic acid sequences encoding any interleukin receptor protein, peptide, or polypeptide having interleukin receptor activity. The term “interleukin receptor” is also meant to include other interleukin receptor encoding sequence, such as other interleukin receptor isoforms, mutant interleukin receptor genes, splice variants of interleukin receptor genes, and interleukin receptor gene polymorphisms.

[0213] By “homologous sequence” is meant, a nucleotide sequence that is shared by one or more polynucleotide sequences, such as genes, gene transcripts and/or non-coding polynucleotides. For example, a homologous sequence can be a nucleotide sequence that is shared by two or more genes encoding related but different proteins, such as different members of a gene family, different protein epitopes, different protein isoforms or completely divergent genes, such as a cytokine and its corresponding receptors. A homologous sequence can be a nucleotide sequence that is shared by two or more non-coding polynucleotides, such as noncoding DNA or RNA, regulatory sequences, introns, and sites of transcriptional control or regulation. Homologous sequences can also include conserved sequence regions shared by more than one polynucleotide sequence. Homology does not need to be perfect homology (e.g., 100%), as partially homologous sequences are also contemplated by the instant invention (e.g., 99%, 98%, 97%, 96%, 95%, 94%, 93%, 92%, 91%, 90%, 89%, 88%, 87%, 86%, 85%, 84%, 83%, 82%, 81%, 80% etc.).

[0214] By “conserved sequence region” is meant, a nucleotide sequence of one or more regions in a polynucleotide does not vary significantly between generations or from one biological system, subject, or organism to another biological system, subject, or organism. The polynucleotide can include both coding and non-coding DNA and RNA.

[0215] By “sense region” is meant a nucleotide sequence of a siNA molecule having complementarity to an antisense region of the siNA molecule. In addition, the sense region of a siNA molecule can comprise a nucleic acid sequence having homology with a target nucleic acid sequence.

[0216] By “antisense region” is meant a nucleotide sequence of a siNA molecule having complementarity to a target nucleic acid sequence. In addition, the antisense region of a siNA molecule can optionally comprise a nucleic acid sequence having complementarity to a sense region of the siNA molecule.

[0217] By “target nucleic acid” is meant any nucleic acid sequence whose expression or activity is to be modulated. The target nucleic acid can be DNA or RNA.

[0218] By “complementarity” is meant that a nucleic acid can form hydrogen bond(s) with another nucleic acid sequence by either traditional Watson-Crick or other non-traditional types. In reference to the nucleic molecules of the present invention, the binding free energy for a nucleic acid molecule with its complementary sequence is sufficient to allow the relevant function of the nucleic acid to proceed, e.g., RNAi activity. Determination of binding free energies for nucleic acid molecules is well known in the art (see, e.g., Turner et al., 1987, CSH Symp. Quant. Biol. LII pp. 123-133; Frier et al., 1986, Proc. Nat. Acad. Sci. USA 83: 9373-9377; Turner et al., 1987, J. Am. Chem. Soc. 109: 3783-3785). A percent complementarity indicates the percentage of contiguous residues in a nucleic acid molecule that can form hydrogen bonds (e.g., Watson-Crick base pairing) with a second nucleic acid sequence (e.g., 5, 6, 7, 8, 9, or 10 nucleotides out of a total of 10 nucleotides in the first oligonucleotide being based paired to a second nucleic acid sequence having 10 nucleotides represents 50%, 60%, 70%, 80%, 90%, and 100% complementary respectively). “Perfectly complementary” means that all the contiguous residues of a nucleic acid sequence will hydrogen bond with the same number of contiguous residues in a second nucleic acid sequence. In one embodiment, a siNA molecule of the invention comprises about 15 to about 30 or more (e.g., about 15, 16, 17, 18, 19, 20, 21, 22, 23, 24, 25, 26, 27, 28, 29, or 30 or more) nucleotides that are complementary to one or more target nucleic acid molecules or a portion thereof.

[0219] In one embodiment, siNA molecules of the invention that down regulate or reduce interleukin and/or interleukin receptor gene expression are used for preventing or treating cancer, inflammatory, respiratory, autoimmune, cardiovascular, neurological, cancer, and/or proliferative diseases, disorders, and/or conditions in a subject or organism.

[0220] In one embodiment, the siNA molecules of the invention are used to treat cancer, inflammatory, respiratory, autoimmune, cardiovascular, neurological, cancer, and/or proliferative diseases, disorders, and/or conditions in a subject or organism.

[0221] By “proliferative disease” or “cancer” as used herein is meant, any disease, condition, trait, genotype or phenotype characterized by unregulated cell growth or replication as is known in the art; including leukemias, for example, acute myelogenous leukemia (AML), chronic myelogenous leukemia (CML), acute lymphocytic leukemia (ALL), and chronic lymphocytic leukemia, AIDS related cancers such as Kaposi's sarcoma; breast cancers; bone cancers such as Osteosarcoma, Chondrosarcomas, Ewing's sarcoma, Fibrosarcomas, Giant cell tumors, Adamantinomas, and Chordomas; Brain cancers such as Meningiomas, Glioblastomas, Lower-Grade Astrocytomas, Oligodendrocytomas, Pituitary Tumors, Schwannomas, and Metastatic brain cancers; cancers of the head and neck including various lymphomas such as mantle cell lymphoma, non-Hodgkins lymphoma, adenoma, squamous cell carcinoma, laryngeal carcinoma, gallbladder and bile duct cancers, cancers of the retina such as retinoblastoma, cancers of the esophagus, gastric cancers, multiple myeloma, ovarian cancer, uterine cancer, thyroid cancer, testicular cancer, endometrial cancer, melanoma, colorectal cancer, lung cancer, bladder cancer, prostate cancer, lung cancer (including non-small cell lung carcinoma), pancreatic cancer, sarcomas, Wilms' tumor, cervical cancer, head and neck cancer, skin cancers, nasopharyngeal carcinoma, liposarcoma, epithelial carcinoma, renal cell carcinoma, gallbladder adeno carcinoma, parotid adenocarcinoma, endometrial sarcoma, multidrug resistant cancers; and proliferative diseases and conditions, such as neovascularization associated with tumor angiogenesis, macular degeneration (e.g., wet/dry AMD), corneal neovascularization, diabetic retinopathy, neovascular glaucoma, myopic degeneration and other proliferative diseases and conditions such as restenosis and polycystic kidney disease, and any other cancer or proliferative disease, condition, trait, genotype or phenotype that can respond to the modulation of disease related gene expression in a cell or tissue, alone or in combination with other therapies.

[0222] By “inflammatory disease” or “inflammatory condition” as used herein is meant any disease, condition, trait, genotype or phenotype characterized by an inflammatory or allergic process as is known in the art, such as inflammation, acute inflammation, chronic inflammation, respiratory disease, atherosclerosis, restenosis, asthma, allergic rhinitis, atopic dermatitis, septic shock, rheumatoid arthritis, inflammatory bowl disease, inflammotory pelvic disease, pain, ocular inflammatory disease, celiac disease, Leigh Syndrome, Glycerol Kinase Deficiency, Familial eosinophilia (FE), autosomal recessive spastic ataxia, laryngeal inflammatory disease; Tuberculosis, Chronic cholecystitis, Bronchiectasis, Silicosis and other pneumoconioses, and any other inflammatory disease, condition, trait, genotype or phenotype that can respond to the modulation of disease related gene expression in a cell or tissue, alone or in combination with other therapies.

[0223] By “autoimmune disease” or “autoimmune condition” as used herein is meant, any disease, condition, trait, genotype or phenotype characterized by autoimmunity as is known in the art, such as multiple sclerosis, diabetes mellitus, lupus, celiac disease, Crohn's disease, ulcerative colitis, Guillain-Barre syndrome, scleroderms, Goodpasture's syndrome, Wegener's granulomatosis, autoimmune epilepsy, Rasmussen's encephalitis, Primary biliary sclerosis, Sclerosing cholangitis, Autoimmune hepatitis, Addison's disease, Hashimoto's thyroiditis, Fibromyalgia, Menier's syndrome; transplantation rejection (e.g., prevention of allograft rejection) pernicious anemia, rheumatoid arthritis, systemic lupus erythematosus, dermatomyositis, Sjogren's syndrome, lupus erythematosus, multiple sclerosis, myasthenia gravis, Reiter's syndrome, Grave's disease, and any other autoimmune disease, condition, trait, genotype or phenotype that can respond to the modulation of disease related gene expression in a cell or tissue, alone or in combination with other therapies.

[0224] By “nuerologic disease” or “neurological disease” is meant any disease, disorder, or condition affecting the central or peripheral nervous system, inlcuding ADHD, AIDS—Neurological Complications, Absence of the Septum Pellucidum, Acquired Epileptiform Aphasia, Acute Disseminated Encephalomyelitis, Adrenoleukodystrophy, Agenesis of the Corpus Callosum, Agnosia, Aicardi Syndrome, Alexander Disease, Alpers' Disease, Alternating Hemiplegia, Alzheimer's Disease, Amyotrophic Lateral Sclerosis, Anencephaly, Aneurysm, Angelman Syndrome, Angiomatosis, Anoxia, Aphasia, Apraxia, Arachnoid Cysts, Arachnoiditis, Arnold-Chiari Malformation, Arteriovenous Malformation, Aspartame, Asperger Syndrome, Ataxia Telangiectasia, Ataxia, Attention Deficit-Hyperactivity Disorder, Autism, Autonomic Dysfunction, Back Pain, Barth Syndrome, Batten Disease, Behcet's Disease, Bell's Palsy, Benign Essential Blepharospasm, Benign Focal Amyotrophy, Benign Intracranial Hypertension, Bernhardt-Roth Syndrome, Binswanger's Disease, Blepharospasm, Bloch-Sulzberger Syndrome, Brachial Plexus Birth Injuries, Brachial Plexus Injuries, Bradbury-Eggleston Syndrome, Brain Aneurysm, Brain Injury, Brain and Spinal Tumors, Brown-Sequard Syndrome, Bulbospinal Muscular Atrophy, Canavan Disease, Carpal Tunnel Syndrome, Causalgia, Cavernomas, Cavernous Angioma, Cavernous Malformation, Central Cervical Cord Syndrome, Central Cord Syndrome, Central Pain Syndrome, Cephalic Disorders, Cerebellar Degeneration, Cerebellar Hypoplasia, Cerebral Aneurysm, Cerebral Arteriosclerosis, Cerebral Atrophy, Cerebral Beriberi, Cerebral Gigantism, Cerebral Hypoxia, Cerebral Palsy, Cerebro-Oculo-Facio-Skeletal Syndrome, Charcot-Marie-Tooth Disorder, Chiari Malformation, Chorea, Choreoacanthocytosis, Chronic Inflammatory Demyelinating Polyneuropathy (CIDP), Chronic Orthostatic Intolerance, Chronic Pain, Cockayne Syndrome Type II, Coffin Lowry Syndrome, Coma, including Persistent Vegetative State, Complex Regional Pain Syndrome, Congenital Facial Diplegia, Congenital Myasthenia, Congenital Myopathy, Congenital Vascular Cavernous Malformations, Corticobasal Degeneration, Cranial Arteritis, Craniosynostosis, Creutzfeldt-Jakob Disease, Cumulative Trauma Disorders, Cushing's Syndrome, Cytomegalic Inclusion Body Disease (CIBD), Cytomegalovirus Infection, Dancing Eyes-Dancing Feet Syndrome, Dandy-Walker Syndrome, Dawson Disease, De Morsier's Syndrome, Dejerine-Klumpke Palsy, Dementia—Multi-Infarct, Dementia—Subcortical, Dementia With Lewy Bodies, Dermatomyositis, Developmental Dyspraxia, Devic's Syndrome, Diabetic Neuropathy, Diffuse Sclerosis, Dravet's Syndrome, Dysautonomia, Dysgraphia, Dyslexia, Dysphagia, Dyspraxia, Dystonias, Early Infantile Epileptic Encephalopathy, Empty Sella Syndrome, Encephalitis Lethargica, Encephalitis and Meningitis, Encephaloceles, Encephalopathy, Encephalotrigeminal Angiomatosis, Epilepsy, Erb's Palsy, Erb-Duchenne and Dejerine-Klumpke Palsies, Fabry's Disease, Fahr's Syndrome, Fainting, Familial Dysautonomia, Familial Hemangioma, Familial Idiopathic Basal Ganglia Calcification, Familial Spastic Paralysis, Febrile Seizures (e.g., GEFS and GEFS plus), Fisher Syndrome, Floppy Infant Syndrome, Friedreich's Ataxia, Gaucher's Disease, Gerstmann's Syndrome, Gerstmann-Straussler-Scheinker Disease, Giant Cell Arteritis, Giant Cell Inclusion Disease, Globoid Cell Leukodystrophy, Glossopharyngeal Neuralgia, Guillain-Barre Syndrome, HTLV-1 Associated Myelopathy, Hallervorden-Spatz Disease, Head Injury, Headache, Hemicrania Continua, Hemifacial Spasm, Hemiplegia Alterans, Hereditary Neuropathies, Hereditary Spastic Paraplegia, Heredopathia Atactica Polyneuritiformis, Herpes Zoster Oticus, Herpes Zoster, Hirayama Syndrome, Holoprosencephaly, Huntington's Disease, Hydranencephaly, Hydrocephalus—Normal Pressure, Hydrocephalus, Hydromyelia, Hypercortisolism, Hypersomnia, Hypertonia, Hypotonia, Hypoxia, Immune-Mediated Encephalomyelitis, Inclusion Body Myositis, Incontinentia Pigmenti, Infantile Hypotonia, Infantile Phytanic Acid Storage Disease, Infantile Refsum Disease, Infantile Spasms, Inflammatory Myopathy, Intestinal Lipodystrophy, Intracranial Cysts, Intracranial Hypertension, Isaac's Syndrome, Joubert Syndrome, Kearns-Sayre Syndrome, Kennedy's Disease, Kinsbourne syndrome, Kleine-Levin syndrome, Klippel Feil Syndrome, Klippel-Trenaunay Syndrome (KTS), Klüver-Bucy Syndrome, Korsakoffs Amnesic Syndrome, Krabbe Disease, Kugelberg-Welander Disease, Kuru, Lambert-Eaton Myasthenic Syndrome, Landau-Kleffner Syndrome, Lateral Femoral Cutaneous Nerve Entrapment, Lateral Medullary Syndrome, Learning Disabilities, Leigh's Disease, Lennox-Gastaut Syndrome, Lesch-Nyhan Syndrome, Leukodystrophy, Levine-Critchley Syndrome, Lewy Body Dementia, Lissencephaly, Locked-In Syndrome, Lou Gehrig's Disease, Lupus—Neurological Sequelae, Lyme Disease—Neurological Complications, Machado-Joseph Disease, Macrencephaly, Megalencephaly, Melkersson-Rosenthal Syndrome, Meningitis, Menkes Disease, Meralgia Paresthetica, Metachromatic Leukodystrophy, Microcephaly, Migraine, Miller Fisher Syndrome, Mini-Strokes, Mitochondrial Myopathies, Mobius Syndrome, Monomelic Amyotrophy, Motor Neuron Diseases, Moyamoya Disease, Mucolipidoses, Mucopolysaccharidoses, Multi-Infarct Dementia, Multifocal Motor Neuropathy, Multiple Sclerosis, Multiple System Atrophy with Orthostatic Hypotension, Multiple System Atrophy, Muscular Dystrophy, Myasthenia—Congenital, Myasthenia Gravis, Myelinoclastic Diffuse Sclerosis, Myoclonic Encephalopathy of Infants, Myoclonus, Myopathy—Congenital, Myopathy—Thyrotoxic, Myopathy, Myotonia Congenita, Myotonia, Narcolepsy, Neuroacanthocytosis, Neurodegeneration with Brain Iron Accumulation, Neurofibromatosis, Neuroleptic Malignant Syndrome, Neurological Complications of AIDS, Neurological Manifestations of Pompe Disease, Neuromyelitis Optica, Neuromyotonia, Neuronal Ceroid Lipofuscinosis, Neuronal Migration Disorders, Neuropathy—Hereditary, Neurosarcoidosis, Neurotoxicity, Nevus Cavernosus, Niemann-Pick Disease, O'Sullivan-McLeod Syndrome, Occipital Neuralgia, Occult Spinal Dysraphism Sequence, Ohtahara Syndrome, Olivopontocerebellar Atrophy, Opsoclonus Myoclonus, Orthostatic Hypotension, Overuse Syndrome, Pain—Chronic, Paraneoplastic Syndromes, Paresthesia, Parkinson's Disease, Parmyotonia Congenita, Paroxysmal Choreoathetosis, Paroxysmal Hemicrania, Parry-Romberg, Pelizaeus-Merzbacher Disease, Pena Shokeir II Syndrome, Perineural Cysts, Periodic Paralyses, Peripheral Neuropathy, Periventricular Leukomalacia, Persistent Vegetative State, Pervasive Developmental Disorders, Phytanic Acid Storage Disease, Pick's Disease, Piriformis Syndrome, Pituitary Tumors, Polymyositis, Pompe Disease, Porencephaly, Post-Polio Syndrome, Postherpetic Neuralgia, Postinfectious Encephalomyelitis, Postural Hypotension, Postural Orthostatic Tachycardia Syndrome, Postural Tachycardia Syndrome, Primary Lateral Sclerosis, Prion Diseases, Progressive Hemifacial Atrophy, Progressive Locomotor Ataxia, Progressive Multifocal Leukoencephalopathy, Progressive Sclerosing Poliodystrophy, Progressive Supranuclear Palsy, Pseudotumor Cerebri, Pyridoxine Dependent and Pyridoxine Responsive Siezure Disorders, Ramsay Hunt Syndrome Type I, Ramsay Hunt Syndrome Type II, Rasmussen's Encephalitis and other autoimmune epilepsies, Reflex Sympathetic Dystrophy Syndrome, Refsum Disease—Infantile, Refsum Disease, Repetitive Motion Disorders, Repetitive Stress Injuries, Restless Legs Syndrome, Retrovirus-Associated Myelopathy, Rett Syndrome, Reye's Syndrome, Riley-Day Syndrome, SUNCT Headache, Sacral Nerve Root Cysts, Saint Vitus Dance, Salivary Gland Disease, Sandhoff Disease, Schilder's Disease, Schizencephaly, Seizure Disorders, Septo-Optic Dysplasia, Severe Myoclonic Epilepsy of Infancy (SMEI), Shaken Baby Syndrome, Shingles, Shy-Drager Syndrome, Sjogren's Syndrome, Sleep Apnea, Sleeping Sickness, Soto's Syndrome, Spasticity, Spina Bifida, Spinal Cord Infarction, Spinal Cord Injury, Spinal Cord Tumors, Spinal Muscular Atrophy, Spinocerebellar Atrophy, Steele-Richardson-Olszewski Syndrome, Stiff-Person Syndrome, Striatonigral Degeneration, Stroke, Sturge-Weber Syndrome, Subacute Sclerosing Panencephalitis, Subcortical Arteriosclerotic Encephalopathy, Swallowing Disorders, Sydenham Chorea, Syncope, Syphilitic Spinal Sclerosis, Syringohydromyelia, Syringomyelia, Systemic Lupus Erythematosus, Tabes Dorsalis, Tardive Dyskinesia, Tarlov Cysts, Tay-Sachs Disease, Temporal Arteritis, Tethered Spinal Cord Syndrome, Thomsen Disease, Thoracic Outlet Syndrome, Thyrotoxic Myopathy, Tic Douloureux, Todd's Paralysis, Tourette Syndrome, Transient Ischemic Attack, Transmissible Spongiform Encephalopathies, Transverse Myelitis, Traumatic Brain Injury, Tremor, Trigeminal Neuralgia, Tropical Spastic Paraparesis, Tuberous Sclerosis, Vascular Erectile Tumor, Vasculitis including Temporal Arteritis, Von Economo's Disease, Von Hippel-Lindau disease (VHL), Von Recklinghausen's Disease, Wallenberg's Syndrome, Werdnig-Hoffman Disease, Wemicke-Korsakoff Syndrome, West Syndrome, Whipple's Disease, Williams Syndrome, Wilson's Disease, X-Linked Spinal and Bulbar Muscular Atrophy, and Zellweger Syndrome.

[0225] By “respiratory disease” is meant, any disease or condition affecting the respiratory tract, such as asthma, chronic obstructive pulmonary disease or “COPD”, allergic rhinitis, sinusitis, pulmonary vasoconstriction, inflammation, allergies, impeded respiration, respiratory distress syndrome, cystic fibrosis, pulmonary hypertension, pulmonary vasoconstriction, emphysema, and any other respiratory disease, condition, trait, genotype or phenotype that can respond to the modulation of disease related gene expression in a cell or tissue, alone or in combination with other therapies.

[0226] By “cardiovascular disease” is meant and disease or condition affecting the heart and vasculature, inlcuding but not limited to, coronary heart disease (CHD), cerebrovascular disease (CVD), aortic stenosis, peripheral vascular disease, atherosclerosis, arteriosclerosis, myocardial infarction (heart attack), cerebrovascular diseases (stroke), transient ischaemic attacks (TIA), angina (stable and unstable), atrial fibrillation, arrhythmia, vavular disease, and/or congestive heart failure.

[0227] In one embodiment of the present invention, each sequence of a siNA molecule of the invention is independently about 15 to about 30 nucleotides in length, in specific embodiments about 15, 16, 17, 18, 19, 20, 21, 22, 23, 24, 25, 26, 27, 28, 29, or 30 nucleotides in length. In another embodiment, the siNA duplexes of the invention independently comprise about 15 to about 30 base pairs (e.g., about 15, 16, 17, 18, 19, 20, 21, 22, 23, 24, 25, 26, 27, 28, 29, or 30). In another embodiment, one or more strands of the siNA molecule of the invention independently comprises about 15 to about 30 nucleotides (e.g., about 15, 16, 17, 18, 19, 20, 21, 22, 23, 24, 25, 26, 27, 28, 29, or 30) that are complementary to a target nucleic acid molecule. In yet another embodiment, siNA molecules of the invention comprising hairpin or circular structures are about 35 to about 55 (e.g., about 35, 40, 45, 50 or 55) nucleotides in length, or about 38 to about 44 (e.g., about 38, 39, 40, 41, 42, 43, or 44) nucleotides in length and comprising about 15 to about 25 (e.g., about 15, 16, 17, 18, 19, 20, 21, 22, 23, 24, or 25) base pairs. Exemplary siNA molecules of the invention are shown in Table II. Exemplary synthetic siNA molecules of the invention are shown in Table III and/or FIGS. 4-5.

[0228] As used herein “cell” is used in its usual biological sense, and does not refer to an entire multicellular organism, e.g., specifically does not refer to a human. The cell can be present in an organism, e.g., birds, plants and mammals such as humans, cows, sheep, apes, monkeys, swine, dogs, and cats. The cell can be prokaryotic (e.g., bacterial cell) or eukaryotic (e.g., mammalian or plant cell). The cell can be of somatic or germ line origin, totipotent or pluripotent, dividing or non-dividing. The cell can also be derived from or can comprise a gamete or embryo, a stem cell, or a fully differentiated cell.

[0229] The siNA molecules of the invention are added directly, or can be complexed with cationic lipids, packaged within liposomes, or otherwise delivered to target cells or tissues. The nucleic acid or nucleic acid complexes can be locally administered to relevant tissues ex vivo, or in vivo through direct dermal application, transdermal application, or injection, with or without their incorporation in biopolymers. In particular embodiments, the nucleic acid molecules of the invention comprise sequences shown in Tables II-III and/or FIGS. 4-5. Examples of such nucleic acid molecules consist essentially of sequences defined in these tables and figures. Furthermore, the chemically modified constructs described in Table IV can be applied to any siNA sequence of the invention.

[0230] In another aspect, the invention provides mammalian cells containing one or more siNA molecules of this invention. The one or more siNA molecules can independently be targeted to the same or different sites.

[0231] By “RNA” is meant a molecule comprising at least one ribonucleotide residue. By “ribonucleotide” is meant a nucleotide with a hydroxyl group at the 2′ position of a β-D-ribofuranose moiety. The terms include double-stranded RNA, single-stranded RNA, isolated RNA such as partially purified RNA, essentially pure RNA, synthetic RNA, recombinantly produced RNA, as well as altered RNA that differs from naturally occurring RNA by the addition, deletion, substitution and/or alteration of one or more nucleotides. Such alterations can include addition of non-nucleotide material, such as to the end(s) of the siNA or internally, for example at one or more nucleotides of the RNA. Nucleotides in the RNA molecules of the instant invention can also comprise non-standard nucleotides, such as non-naturally occurring nucleotides or chemically synthesized nucleotides or deoxynucleotides. These altered RNAs can be referred to as analogs or analogs of naturally-occurring RNA.

[0232] By “subject” is meant an organism, which is a donor or recipient of explanted cells or the cells themselves. “Subject” also refers to an organism to which the nucleic acid molecules of the invention can be administered. A subject can be a mammal or mammalian cells, including a human or human cells.

[0233] The term “phosphorothioate” as used herein refers to an internucleotide linkage having Formula I, wherein Z and/or W comprise a sulfur atom. Hence, the term phosphorothioate refers to both phosphorothioate and phosphorodithioate internucleotide linkages.

[0234] The term “phosphonoacetate” as used herein refers to an internucleotide linkage having Formula I, wherein Z and/or W comprise an acetyl or protected acetyl group.

[0235] The term “thiophosphonoacetate” as used herein refers to an internucleotide linkage having Formula I, wherein Z comprises an acetyl or protected acetyl group and W comprises a sulfur atom or alternately W comprises an acetyl or protected acetyl group and Z comprises a sulfur atom.

[0236] The term “universal base” as used herein refers to nucleotide base analogs that form base pairs with each of the natural DNA/RNA bases with little discrimination between them. Non-limiting examples of universal bases include C-phenyl, C-naphthyl and other aromatic derivatives, inosine, azole carboxamides, and nitroazole derivatives such as 3-nitropyrrole, 4-nitroindole, 5-nitroindole, and 6-nitroindole as known in the art (see for example Loakes, 2001, Nucleic Acids Research, 29, 2437-2447).

[0237] The term “acyclic nucleotide” as used herein refers to any nucleotide having an acyclic ribose sugar, for example where any of the ribose carbons (C1, C2, C3, C4, or C5), are independently or in combination absent from the nucleotide.

[0238] The nucleic acid molecules of the instant invention, individually, or in combination or in conjunction with other drugs, can be used to for preventing or treating cancer, inflammatory, respiratory, autoimmune, cardiovascular, neurological, and/or proliferative diseases, conditions, or disorders in a subject or organism.

[0239] For example, the siNA molecules can be administered to a subject or can be administered to other appropriate cells evident to those skilled in the art, individually or in combination with one or more drugs under conditions suitable for the treatment.

[0240] In a further embodiment, the siNA molecules can be used in combination with other known treatments to prevent or treat cancer, inflammatory, respiratory, autoimmune, cardiovascular, neurological, and/or proliferative diseases, conditions, or disorders in a subject or organism. For example, the described molecules could be used in combination with one or more known compounds, treatments, or procedures to prevent or treat cancer, inflammatory, respiratory, autoimmune, cardiovascular, neurological, and/or proliferative diseases, conditions, or disorders in a subject or organism as are known in the art.

[0241] In one embodiment, the invention features an expression vector comprising a nucleic acid sequence encoding at least one siNA molecule of the invention, in a manner which allows expression of the siNA molecule. For example, the vector can contain sequence(s) encoding both strands of a siNA molecule comprising a duplex. The vector can also contain sequence(s) encoding a single nucleic acid molecule that is self-complementary and thus forms a siNA molecule. Non-limiting examples of such expression vectors are described in Paul et al., 2002, Nature Biotechnology, 19, 505; Miyagishi and Taira, 2002, Nature Biotechnology, 19, 497; Lee et al., 2002, Nature Biotechnology, 19, 500; and Novina et al., 2002, Nature Medicine, advance online publication doi: 10.1038/nm725.

[0242] In another embodiment, the invention features a mammalian cell, for example, a human cell, including an expression vector of the invention.

[0243] In yet another embodiment, the expression vector of the invention comprises a sequence for a siNA molecule having complementarity to a RNA molecule referred to by a Genbank Accession numbers, for example Genbank Accession Nos. shown in Table I.

[0244] In one embodiment, an expression vector of the invention comprises a nucleic acid sequence encoding two or more siNA molecules, which can be the same or different.

[0245] In another aspect of the invention, siNA molecules that interact with target RNA molecules and down-regulate gene encoding target RNA molecules (for example target RNA molecules referred to by Genbank Accession numbers herein) are expressed from transcription units inserted into DNA or RNA vectors. The recombinant vectors can be DNA plasmids or viral vectors. siNA expressing viral vectors can be constructed based on, but not limited to, adeno-associated virus, retrovirus, adenovirus, or alphavirus. The recombinant vectors capable of expressing the siNA molecules can be delivered as described herein, and persist in target cells. Alternatively, viral vectors can be used that provide for transient expression of siNA molecules. Such vectors can be repeatedly administered as necessary. Once expressed, the siNA molecules bind and down-regulate gene function or expression via RNA interference (RNAi). Delivery of siNA expressing vectors can be systemic, such as by intravenous or intramuscular administration, by administration to target cells ex-planted from a subject followed by reintroduction into the subject, or by any other means that would allow for introduction into the desired target cell.

[0246] By “vectors” is meant any nucleic acid- and/or viral-based technique used to deliver a desired nucleic acid.

[0247] Other features and advantages of the invention will be apparent from the following description of the preferred embodiments thereof, and from the claims.

### BRIEF DESCRIPTION OF THE DRAWINGS

[0248] FIG. 1 shows a non-limiting example of a scheme for the synthesis of siNA molecules. The complementary siNA sequence strands, strand I and strand 2, are synthesized in tandem and are connected by a cleavable linkage, such as a nucleotide succinate or abasic succinate, which can be the same or different from the cleavable linker used for solid phase synthesis on a solid support. The synthesis can be either solid phase or solution phase, in the example shown, the synthesis is a solid phase synthesis. The synthesis is performed such that a protecting group, such as a dimethoxytrityl group, remains intact on the terminal nucleotide of the tandem oligonucleotide. Upon cleavage and deprotection of the oligonucleotide, the two siNA strands spontaneously hybridize to form a siNA duplex, which allows the purification of the duplex by utilizing the properties of the terminal protecting group, for example by applying a trityl on purification method wherein only duplexes/oligonucleotides with the terminal protecting group are isolated.

[0249] FIG. 2 shows a MALDI-TOF mass spectrum of a purified siNA duplex synthesized by a method of the invention. The two peaks shown correspond to the predicted mass of the separate siNA sequence strands. This result demonstrates that the siNA duplex generated from tandem synthesis can be purified as a single entity using a simple trityl-on purification methodology.

[0250] FIG. 3 shows a non-limiting proposed mechanistic representation of target RNA degradation involved in RNAi. Double-stranded RNA (dsRNA), which is generated by RNA-dependent RNA polymerase (RdRP) from foreign single-stranded RNA, for example viral, transposon, or other exogenous RNA, activates the DICER enzyme that in turn generates siNA duplexes. Alternately, synthetic or expressed siNA can be introduced directly into a cell by appropriate means. An active siNA complex forms which recognizes a target RNA, resulting in degradation of the target RNA by the RISC endonuclease complex or in the synthesis of additional RNA by RNA-dependent RNA polymerase (RdRP), which can activate DICER and result in additional siNA molecules, thereby amplifying the RNAi response.

[0251] FIG. 4A-F shows non-limiting examples of chemically-modified siNA constructs of the present invention. In the figure, N stands for any nucleotide (adenosine, guanosine, cytosine, uridine, or optionally thymidine, for example thymidine can be substituted in the overhanging regions designated by parenthesis (N N). Various modifications are shown for the sense and antisense strands of the siNA constructs.

[0252] FIG. 4A: The sense strand comprises 21 nucleotides wherein the two terminal 3′-nucleotides are optionally base paired and wherein all nucleotides present are ribonucleotides except for (N N) nucleotides, which can comprise ribonucleotides, deoxynucleotides, universal bases, or other chemical modifications described herein. The antisense strand comprises 21 nucleotides, optionally having a 3′-terminal glyceryl moiety wherein the two terminal 3′-nucleotides are optionally complementary to the target RNA sequence, and wherein all nucleotides present are ribonucleotides except for (N N) nucleotides, which can comprise ribonucleotides, deoxynucleotides, universal bases, or other chemical modifications described herein. A modified internucleotide linkage, such as a phosphorothioate, phosphorodithioate or other modified internucleotide linkage as described herein, shown as “s”, optionally connects the (N N) nucleotides in the antisense strand.

[0253] FIG. 4B: The sense strand comprises 21 nucleotides wherein the two terminal 3′-nucleotides are optionally base paired and wherein all pyrimidine nucleotides that may be present are 2′deoxy-2′-fluoro modified nucleotides and all purine nucleotides that may be present are 2′-O-methyl modified nucleotides except for (N N) nucleotides, which can comprise ribonucleotides, deoxynucleotides, universal bases, or other chemical modifications described herein. The antisense strand comprises 21 nucleotides, optionally having a 3′-terminal glyceryl moiety and wherein the two terminal 3′-nucleotides are optionally complementary to the target RNA sequence, and wherein all pyrimidine nucleotides that may be present are 2′-deoxy-2′-fluoro modified nucleotides and all purine nucleotides that may be present are 2′-O-methyl modified nucleotides except for (N N) nucleotides, which can comprise ribonucleotides, deoxynucleotides, universal bases, or other chemical modifications described herein. A modified internucleotide linkage, such as a phosphorothioate, phosphorodithioate or other modified internucleotide linkage as described herein, shown as “s”, optionally connects the (N N) nucleotides in the sense and antisense strand.

[0254] FIG. 4C: The sense strand comprises 21 nucleotides having 5′- and 3′-terminal cap moieties wherein the two terminal 3′-nucleotides are optionally base paired and wherein all pyrimidine nucleotides that may be present are 2′-O-methyl or 2′-deoxy-2′-fluoro modified nucleotides except for (N N) nucleotides, which can comprise ribonucleotides, deoxynucleotides, universal bases, or other chemical modifications described herein. The antisense strand comprises 21 nucleotides, optionally having a 3′-terminal glyceryl moiety and wherein the two terminal 3′-nucleotides are optionally complementary to the target RNA sequence, and wherein all pyrimidine nucleotides that may be present are 2′-deoxy-2′-fluoro modified nucleotides except for (N N) nucleotides, which can comprise ribonucleotides, deoxynucleotides, universal bases, or other chemical modifications described herein. A modified internucleotide linkage, such as a phosphorothioate, phosphorodithioate or other modified internucleotide linkage as described herein, shown as “s”, optionally connects the (N N) nucleotides in the antisense strand.

[0255] FIG. 4D: The sense strand comprises 21 nucleotides having 5′- and 3′-terminal cap moieties wherein the two terminal 3′-nucleotides are optionally base paired and wherein all pyrimidine nucleotides that may be present are 2′-deoxy-2′-fluoro modified nucleotides except for (N N) nucleotides, which can comprise ribonucleotides, deoxynucleotides, universal bases, or other chemical modifications described herein and wherein and all purine nucleotides that may be present are 2′-deoxy nucleotides. The antisense strand comprises 21 nucleotides, optionally having a 3′-terminal glyceryl moiety and wherein the two terminal 3′-nucleotides are optionally complementary to the target RNA sequence, wherein all pyrimidine nucleotides that may be present are 2′-deoxy-2′-fluoro modified nucleotides and all purine nucleotides that may be present are 2′-O-methyl modified nucleotides except for (N N) nucleotides, which can comprise ribonucleotides, deoxynucleotides, universal bases, or other chemical modifications described herein. A modified internucleotide linkage, such as a phosphorothioate, phosphorodithioate or other modified internucleotide linkage as described herein, shown as “s”, optionally connects the (N N) nucleotides in the antisense strand.

[0256] FIG. 4E: The sense strand comprises 21 nucleotides having 5′- and 3′-terminal cap moieties wherein the two terminal 3′-nucleotides are optionally base paired and wherein all pyrimidine nucleotides that may be present are 2′-deoxy-2′-fluoro modified nucleotides except for (N N) nucleotides, which can comprise ribonucleotides, deoxynucleotides, universal bases, or other chemical modifications described herein. The antisense strand comprises 21 nucleotides, optionally having a 3′-terminal glyceryl moiety and wherein the two terminal 3′-nucleotides are optionally complementary to the target RNA sequence, and wherein all pyrimidine nucleotides that may be present are 2′-deoxy-2′-fluoro modified nucleotides and all purine nucleotides that may be present are 2′-O-methyl modified nucleotides except for (N N) nucleotides, which can comprise ribonucleotides, deoxynucleotides, universal bases, or other chemical modifications described herein. A modified internucleotide linkage, such as a phosphorothioate, phosphorodithioate or other modified internucleotide linkage as described herein, shown as “s”, optionally connects the (N N) nucleotides in the antisense strand.

[0257] FIG. 4F: The sense strand comprises 21 nucleotides having 5′- and 3′-terminal cap moieties wherein the two terminal 3′-nucleotides are optionally base paired and wherein all pyrimidine nucleotides that may be present are 2′-deoxy-2′-fluoro modified nucleotides except for (N N) nucleotides, which can comprise ribonucleotides, deoxynucleotides, universal bases, or other chemical modifications described herein and wherein and all purine nucleotides that may be present are 2′-deoxy nucleotides. The antisense strand comprises 21 nucleotides, optionally having a 3′-terminal glyceryl moiety and wherein the two terminal 3′-nucleotides are optionally complementary to the target RNA sequence, and having one 3′-terminal phosphorothioate internucleotide linkage and wherein all pyrimidine nucleotides that may be present are 2′-deoxy-2′-fluoro modified nucleotides and all purine nucleotides that may be present are 2′-deoxy nucleotides except for (N N) nucleotides, which can comprise ribonucleotides, deoxynucleotides, universal bases, or other chemical modifications described herein. A modified internucleotide linkage, such as a phosphorothioate, phosphorodithioate or other modified internucleotide linkage as described herein, shown as “s”, optionally connects the (N N) nucleotides in the antisense strand. The antisense strand of constructs A-F comprise sequence complementary to any target nucleic acid sequence of the invention. Furthermore, when a glyceryl moiety (L) is present at the 3′-end of the antisense strand for any construct shown in FIG. 4A-F, the modified internucleotide linkage is optional.

[0258] FIG. 5A-F shows non-limiting examples of specific chemically-modified siNA sequences of the invention. A-F applies the chemical modifications described in FIG. 4A-F to an IL-13R siNA sequence. Such chemical modifications can be applied to any interleukin and/or interleukin receptor sequence and/or interleukin and/or interleukin receptor polymorphism sequence.

[0259] FIG. 6 shows non-limiting examples of different siNA constructs of the invention. The examples shown (constructs 1, 2, and 3) have 19 representative base pairs; however, different embodiments of the invention include any number of base pairs described herein. Bracketed regions represent nucleotide overhangs, for example, comprising about 1, 2, 3, or 4 nucleotides in length, preferably about 2 nucleotides. Constructs 1 and 2 can be used independently for RNAi activity. Construct 2 can comprise a polynucleotide or non-nucleotide linker, which can optionally be designed as a biodegradable linker. In one embodiment, the loop structure shown in construct 2 can comprise a biodegradable linker that results in the formation of construct 1 in vivo and/or in vitro. In another example, construct 3 can be used to generate construct 2 under the same principle wherein a linker is used to generate the active siNA construct 2 in vivo and/or in vitro, which can optionally utilize another biodegradable linker to generate the active siNA construct 1 in vivo and/or in vitro. As such, the stability and/or activity of the siNA constructs can be modulated based on the design of the siNA construct for use in vivo or in vitro and/or in vitro.

[0260] FIG. 7A-C is a diagrammatic representation of a scheme utilized in generating an expression cassette to generate siNA hairpin constructs.

[0261] FIG. 7A: A DNA oligomer is synthesized with a 5′-restriction site (R1) sequence followed by a region having sequence identical (sense region of siNA) to a predetermined interleukin and/or interleukin receptor target sequence, wherein the sense region comprises, for example, about 19, 20, 21, or 22 nucleotides (N) in length, which is followed by a loop sequence of defined sequence (X), comprising, for example, about 3 to about 10 nucleotides.

[0262] FIG. 7B: The synthetic construct is then extended by DNA polymerase to generate a hairpin structure having self-complementary sequence that will result in a siNA transcript having specificity for a interleukin and/or interleukin receptor target sequence and having self-complementary sense and antisense regions.

[0263] FIG. 7C: The construct is heated (for example to about 95° C.) to linearize the sequence, thus allowing extension of a complementary second DNA strand using a primer to the 3′-restriction sequence of the first strand. The double-stranded DNA is then inserted into an appropriate vector for expression in cells. The construct can be designed such that a 3′-terminal nucleotide overhang results from the transcription, for example, by engineering restriction sites and/or utilizing a poly-U termination region as described in Paul et al., 2002, Nature Biotechnology, 29, 505-508.

[0264] FIG. 8A-C is a diagrammatic representation of a scheme utilized in generating an expression cassette to generate double-stranded siNA constructs.

[0265] FIG. 8A: A DNA oligomer is synthesized with a 5′-restriction (R1) site sequence followed by a region having sequence identical (sense region of siNA) to a predetermined interleukin and/or interleukin receptor target sequence, wherein the sense region comprises, for example, about 19, 20, 21, or 22 nucleotides (N) in length, and which is followed by a 3′-restriction site (R2) which is adjacent to a loop sequence of defined sequence (X).

[0266] FIG. 8B: The synthetic construct is then extended by DNA polymerase to generate a hairpin structure having self-complementary sequence.

[0267] FIG. 8C: The construct is processed by restriction enzymes specific to R1 and R2 to generate a double-stranded DNA which is then inserted into an appropriate vector for expression in cells. The transcription cassette is designed such that a U6 promoter region flanks each side of the dsDNA which generates the separate sense and antisense strands of the siNA. Poly T termination sequences can be added to the constructs to generate U overhangs in the resulting transcript.

[0268] FIG. 9A-E is a diagrammatic representation of a method used to determine target sites for siNA mediated RNAi within a particular target nucleic acid sequence, such as messenger RNA.

[0269] FIG. 9A: A pool of siNA oligonucleotides are synthesized wherein the antisense region of the siNA constructs has complementarity to target sites across the target nucleic acid sequence, and wherein the sense region comprises sequence complementary to the antisense region of the siNA.

[0270] FIGS. 9B&C: (FIG. 9B) The sequences are pooled and are inserted into vectors such that (FIG. 9C) transfection of a vector into cells results in the expression of the siNA.

[0271] FIG. 9D: Cells are sorted based on phenotypic change that is associated with modulation of the target nucleic acid sequence.

[0272] FIG. 9E: The siNA is isolated from the sorted cells and is sequenced to identify efficacious target sites within the target nucleic acid sequence.

[0273] FIG. 10 shows non-limiting examples of different stabilization chemistries (1-10) that can be used, for example, to stabilize the 3′-end of siNA sequences of the invention, including (1) [3-3′]-inverted deoxyribose; (2) deoxyribonucleotide; (3) [5′-3′]-3′-deoxyribonucleotide; (4) [5′-3′]-ribonucleotide; (5) [5′-3′]-3′-O-methyl ribonucleotide; (6) 3′-glyceryl; (7) [3′-5′]-3′-deoxyribonucleotide; (8) [3′-3′]-deoxyribonucleotide; (9) [5′-2′]-deoxyribonucleotide; and (10) [5-3′]-dideoxyribonucleotide. In addition to modified and unmodified backbone chemistries indicated in the figure, these chemistries can be combined with different backbone modifications as described herein, for example, backbone modifications having Formula I. In addition, the 2′-deoxy nucleotide shown 5′ to the terminal modifications shown can be another modified or unmodified nucleotide or non-nucleotide described herein, for example modifications having any of Formulae I-VII or any combination thereof.

[0274] FIG. 11 shows a non-limiting example of a strategy used to identify chemically modified siNA constructs of the invention that are nuclease resistance while preserving the ability to mediate RNAi activity. Chemical modifications are introduced into the siNA construct based on educated design parameters (e.g. introducing 2′-mofications, base modifications, backbone modifications, terminal cap modifications etc). The modified construct in tested in an appropriate system (e.g. human serum for nuclease resistance, shown, or an animal model for PK/delivery parameters). In parallel, the siNA construct is tested for RNAi activity, for example in a cell culture system such as a luciferase reporter assay). Lead siNA constructs are then identified which possess a particular characteristic while maintaining RNAi activity, and can be further modified and assayed once again. This same approach can be used to identify siNA-conjugate molecules with improved pharmacokinetic profiles, delivery, and RNAi activity.

[0275] FIG. 12 shows non-limiting examples of phosphorylated siNA molecules of the invention, including linear and duplex constructs and asymmetric derivatives thereof.

[0276] FIG. 13 shows non-limiting examples of chemically modified terminal phosphate groups of the invention.

[0277] FIG. 14A shows a non-limiting example of methodology used to design self complementary DFO constructs utilizing palidrome and/or repeat nucleic acid sequences that are identified in a target nucleic acid sequence. (i) A palindrome or repeat sequence is identified in a nucleic acid target sequence. (ii) A sequence is designed that is complementary to the target nucleic acid sequence and the palindrome sequence. (iii) An inverse repeat sequence of the non-palindrome/repeat portion of the complementary sequence is appended to the 3′-end of the complementary sequence to generate a self complementary DFO molecule comprising sequence complementary to the nucleic acid target. (iv) The DFO molecule can self-assemble to form a double stranded oligonucleotide. FIG. 14B shows a non-limiting representative example of a duplex forming oligonucleotide sequence. FIG. 14C shows a non-limiting example of the self assembly schematic of a representative duplex forming oligonucleotide sequence. FIG. 14D shows a non-limiting example of the self assembly schematic of a representative duplex forming oligonucleotide sequence followed by interaction with a target nucleic acid sequence resulting in modulation of gene expression.

[0278] FIG. 15 shows a non-limiting example of the design of self complementary DFO constructs utilizing palidrome and/or repeat nucleic acid sequences that are incorporated into the DFO constructs that have sequence complementary to any target nucleic acid sequence of interest. Incorporation of these palindrome/repeat sequences allow the design of DFO constructs that form duplexes in which each strand is capable of mediating modulation of target gene expression, for example by RNAi. First, the target sequence is identified. A complementary sequence is then generated in which nucleotide or non-nucleotide modifications (shown as X or Y) are introduced into the complementary sequence that generate an artificial palindrome (shown as XYXYXY in the Figure). An inverse repeat of the non-palindrome/repeat complementary sequence is appended to the 3′-end of the complementary sequence to generate a self complementary DFO comprising sequence complementary to the nucleic acid target. The DFO can self-assemble to form a double stranded oligonucleotide.

[0279] FIG. 16 shows non-limiting examples of multifunctional siNA molecules of the invention comprising two separate polynucleotide sequences that are each capable of mediating RNAi directed cleavage of differing target nucleic acid sequences. FIG. 16A shows a non-limiting example of a multifunctional siNA molecule having a first region that is complementary to a first target nucleic acid sequence (complementary region 1) and a second region that is complementary to a second target nucleic acid sequence (complementary region 2), wherein the first and second complementary regions are situated at the 3′-ends of each polynucleotide sequence in the multifunctional siNA. The dashed portions of each polynucleotide sequence of the multifunctional siNA construct have complementarity with regard to corresponding portions of the siNA duplex, but do not have complementarity to the target nucleic acid sequences. FIG. 16B shows a non-limiting example of a multifunctional siNA molecule having a first region that is complementary to a first target nucleic acid sequence (complementary region 1) and a second region that is complementary to a second target nucleic acid sequence (complementary region 2), wherein the first and second complementary regions are situated at the 5′-ends of each polynucleotide sequence in the multifunctional siNA. The dashed portions of each polynucleotide sequence of the multifunctional siNA construct have complementarity with regard to corresponding portions of the siNA duplex, but do not have complementarity to the target nucleic acid sequences.

[0280] FIG. 17 shows non-limiting examples of multifunctional siNA molecules of the invention comprising a single polynucleotide sequence comprising distinct regions that are each capable of mediating RNAi directed cleavage of differing target nucleic acid sequences. FIG. 17A shows a non-limiting example of a multifunctional siNA molecule having a first region that is complementary to a first target nucleic acid sequence (complementary region 1) and a second region that is complementary to a second target nucleic acid sequence (complementary region 2), wherein the second complementary region is situated at the 3′-end of the polynucleotide sequence in the multifunctional siNA. The dashed portions of each polynucleotide sequence of the multifunctional siNA construct have complementarity with regard to corresponding portions of the siNA duplex, but do not have complementarity to the target nucleic acid sequences. FIG. 17B shows a non-limiting example of a multifunctional siNA molecule having a first region that is complementary to a first target nucleic acid sequence (complementary region 1) and a second region that is complementary to a second target nucleic acid sequence (complementary region 2), wherein the first complementary region is situated at the 5′-end of the polynucleotide sequence in the multifunctional siNA. The dashed portions of each polynucleotide sequence of the multifunctional siNA construct have complementarity with regard to corresponding portions of the siNA duplex, but do not have complementarity to the target nucleic acid sequences. In one embodiment, these multifunctional siNA constructs are processed in vivo or in vitro to generate multifunctional siNA constructs as shown in FIG. 16.

[0281] FIG. 18 shows non-limiting examples of multifunctional siNA molecules of the invention comprising two separate polynucleotide sequences that are each capable of mediating RNAi directed cleavage of differing target nucleic acid sequences and wherein the multifunctional siNA construct further comprises a self complementary, palindrome, or repeat region, thus enabling shorter bifuctional siNA constructs that can mediate RNA interference against differing target nucleic acid sequences. FIG. 18A shows a non-limiting example of a multifunctional siNA molecule having a first region that is complementary to a first target nucleic acid sequence (complementary region 1) and a second region that is complementary to a second target nucleic acid sequence (complementary region 2), wherein the first and second complementary regions are situated at the 3′-ends of each polynucleotide sequence in the multifunctional siNA, and wherein the first and second complementary regions further comprise a self complementary, palindrome, or repeat region. The dashed portions of each polynucleotide sequence of the multifunctional siNA construct have complementarity with regard to corresponding portions of the siNA duplex, but do not have complementarity to the target nucleic acid sequences. FIG. 18B shows a non-limiting example of a multifunctional siNA molecule having a first region that is complementary to a first target nucleic acid sequence (complementary region 1) and a second region that is complementary to a second target nucleic acid sequence (complementary region 2), wherein the first and second complementary regions are situated at the 5′-ends of each polynucleotide sequence in the multifunctional siNA, and wherein the first and second complementary regions further comprise a self complementary, palindrome, or repeat region. The dashed portions of each polynucleotide sequence of the multifunctional siNA construct have complementarity with regard to corresponding portions of the siNA duplex, but do not have complementarity to the target nucleic acid sequences.

[0282] FIG. 19 shows non-limiting examples of multifunctional siNA molecules of the invention comprising a single polynucleotide sequence comprising distinct regions that are each capable of mediating RNAi directed cleavage of differing target nucleic acid sequences and wherein the multifunctional siNA construct further comprises a self complementary, palindrome, or repeat region, thus enabling shorter bifuctional siNA constructs that can mediate RNA interference against differing target nucleic acid sequences. FIG. 19A shows a non-limiting example of a multifunctional siNA molecule having a first region that is complementary to a first target nucleic acid sequence (complementary region 1) and a second region that is complementary to a second target nucleic acid sequence (complementary region 2), wherein the second complementary region is situated at the 3′-end of the polynucleotide sequence in the multifunctional siNA, and wherein the first and second complementary regions further comprise a self complementary, palindrome, or repeat region. The dashed portions of each polynucleotide sequence of the multifunctional siNA construct have complementarity with regard to corresponding portions of the siNA duplex, but do not have complementarity to the target nucleic acid sequences. FIG. 19B shows a non-limiting example of a multifunctional siNA molecule having a first region that is complementary to a first target nucleic acid sequence (complementary region 1) and a second region that is complementary to a second target nucleic acid sequence (complementary region 2), wherein the first complementary region is situated at the 5′-end of the polynucleotide sequence in the multifunctional siNA, and wherein the first and second complementary regions further comprise a self complementary, palindrome, or repeat region. The dashed portions of each polynucleotide sequence of the multifunctional siNA construct have complementarity with regard to corresponding portions of the siNA duplex, but do not have complementarity to the target nucleic acid sequences. In one embodiment, these multifunctional siNA constructs are processed in vivo or in vitro to generate multifunctional siNA constructs as shown in FIG. 18.

[0283] FIG. 20 shows a non-limiting example of how multifunctional siNA molecules of the invention can target two separate target nucleic acid molecules, such as separate RNA molecules encoding differing proteins, for example, a cytokine and its corresponding receptor, differing viral strains, a virus and a cellular protein involved in viral infection or replication, or differing proteins involved in a common or divergent biologic pathway that is implicated in the maintenance of progression of disease. Each strand of the multifunctional siNA construct comprises a region having complementarity to separate target nucleic acid molecules. The multifunctional siNA molecule is designed such that each strand of the siNA can be utilized by the RISC complex to initiate RNA interference mediated cleavage of its corresponding target. These design parameters can include destabilization of each end of the siNA construct (see for example Schwarz et al., 2003, Cell, 115, 199-208). Such destabilization can be accomplished for example by using guanosine-cytidine base pairs, alternate base pairs (e.g., wobbles), or destabilizing chemically modified nucleotides at terminal nucleotide positions as is known in the art.

[0284] FIG. 21 shows a non-limiting example of how multifunctional siNA molecules of the invention can target two separate target nucleic acid sequences within the same target nucleic acid molecule, such as alternate coding regions of a RNA, coding and non-coding regions of a RNA, or alternate splice variant regions of a RNA. Each strand of the multifunctional siNA construct comprises a region having complementarity to the separate regions of the target nucleic acid molecule. The multifunctional siNA molecule is designed such that each strand of the siNA can be utilized by the RISC complex to initiate RNA interference mediated cleavage of its corresponding target region. These design parameters can include destabilization of each end of the siNA construct (see for example Schwarz et al., 2003, Cell, 115, 199-208). Such destabilization can be accomplished for example by using guanosine-cytidine base pairs, alternate base pairs (e.g., wobbles), or destabilizing chemically modified nucleotides at terminal nucleotide positions as is known in the art.

[0285] FIG. 22 shows a non-limiting example of reduction of IL-4R mRNA in HeLa cells mediated by chemically modified siNAs that target IL-4R mRNA. HeLa cells were transfected with 0.25 ug/well of lipid complexed with 25 nM siNA. Active siNA constructs comprising various stabilization chemistries (see Tables III and IV) were compared to matched chemistry irrelevant siNA control constructs (IC), and cells transfected with lipid alone (transfection control). As shown in the figure, the siNA constructs significantly reduce IL-4R RNA expression.

[0286] FIG. 23 shows a non-limiting example of reduction of IL-13R mRNA in HeLa cells mediated by chemically modified siNAs that target IL-13R mRNA. HeLa cells were transfected with 0.25 ug/well of lipid complexed with 25 nM siNA. Active siNA constructs (solid bars) comprising various stabilization chemistries (see Tables III and IV) were compared to untreated cells, matched chemistry irrelevant siNA control constructs (IC), and cells transfected with lipid alone (transfection control). As shown in the figure, the siNA constructs significantly reduce IL-13R RNA expression.

### DETAILED DESCRIPTION OF THE INVENTION

Mechanism of Action of Nucleic Acid Molecules of the Invention

[0287] The discussion that follows discusses the proposed mechanism of RNA interference mediated by short interfering RNA as is presently known, and is not meant to be limiting and is not an admission of prior art. Applicant demonstrates herein that chemically-modified short interfering nucleic acids possess similar or improved capacity to mediate RNAi as do siRNA molecules and are expected to possess improved stability and activity in vivo; therefore, this discussion is not meant to be limiting only to siRNA and can be applied to siNA as a whole. By “improved capacity to mediate RNAi” or “improved RNAi activity” is meant to include RNAi activity measured in vitro and/or in vivo where the RNAi activity is a reflection of both the ability of the siNA to mediate RNAi and the stability of the siNAs of the invention. In this invention, the product of these activities can be increased in vitro and/or in vivo compared to an all RNA siRNA or a siNA containing a plurality of ribonucleotides. In some cases, the activity or stability of the siNA molecule can be decreased (i.e., less than ten-fold), but the overall activity of the siNA molecule is enhanced in vitro and/or in vivo.

[0288] RNA interference refers to the process of sequence specific post-transcriptional gene silencing in animals mediated by short interfering RNAs (siRNAs) (Fire et al., 1998, Nature, 391, 806). The corresponding process in plants is commonly referred to as post-transcriptional gene silencing or RNA silencing and is also referred to as quelling in fungi. The process of post-transcriptional gene silencing is thought to be an evolutionarily-conserved cellular defense mechanism used to prevent the expression of foreign genes which is commonly shared by diverse flora and phyla (Fire et al., 1999, Trends Genet., 15, 358). Such protection from foreign gene expression may have evolved in response to the production of double-stranded RNAs (dsRNAs) derived from viral infection or the random integration of transposon elements into a host genome via a cellular response that specifically destroys homologous single-stranded RNA or viral genomic RNA. The presence of dsRNA in cells triggers the RNAi response though a mechanism that has yet to be fully characterized. This mechanism appears to be different from the interferon response that results from dsRNA-mediated activation of protein kinase PKR and 2′,5′-oligoadenylate synthetase resulting in non-specific cleavage of mRNA by ribonuclease L.

[0289] The presence of long dsRNAs in cells stimulates the activity of a ribonuclease III enzyme referred to as Dicer. Dicer is involved in the processing of the dsRNA into short pieces of dsRNA known as short interfering RNAs (siRNAs) (Berstein et al., 2001, Nature, 409, 363). Short interfering RNAs derived from Dicer activity are typically about 21 to about 23 nucleotides in length and comprise about 19 base pair duplexes. Dicer has also been implicated in the excision of 21- and 22-nucleotide small temporal RNAs (stRNAs) from precursor RNA of conserved structure that are implicated in translational control (Hutvagner et al., 2001, Science, 293, 834). The RNAi response also features an endonuclease complex containing a siRNA, commonly referred to as an RNA-induced silencing complex (RISC), which mediates cleavage of single-stranded RNA having sequence homologous to the siRNA. Cleavage of the target RNA takes place in the middle of the region complementary to the guide sequence of the siRNA duplex (Elbashir et al., 2001, Genes Dev., 15, 188). In addition, RNA interference can also involve small RNA (e.g., micro-RNA or mRNA) mediated gene silencing, presumably though cellular mechanisms that regulate chromatin structure and thereby prevent transcription of target gene sequences (see for example Allshire, 2002, Science, 297, 1818-1819; Volpe et al., 2002, Science, 297, 1833-1837; Jenuwein, 2002, Science, 297, 2215-2218; and Hall et al., 2002, Science, 297, 2232-2237). As such, siNA molecules of the invention can be used to mediate gene silencing via interaction with RNA transcripts or alternately by interaction with particular gene sequences, wherein such interaction results in gene silencing either at the transcriptional level or post-transcriptional level.

[0290] RNAi has been studied in a variety of systems. Fire et al., 1998, Nature, 391, 806, were the first to observe RNAi in C. elegans. Wianny and Goetz, 1999, Nature Cell Biol., 2, 70, describe RNAi mediated by dsRNA in mouse embryos. Hammond et al., 2000, Nature, 404, 293, describe RNAi in Drosophila cells transfected with dsRNA. Elbashir et al., 2001, Nature, 411, 494, describe RNAi induced by introduction of duplexes of synthetic 21-nucleotide RNAs in cultured mammalian cells including human embryonic kidney and HeLa cells. Recent work in Drosophila embryonic lysates has revealed certain requirements for siRNA length, structure, chemical composition, and sequence that are essential to mediate efficient RNAi activity. These studies have shown that 21 nucleotide siRNA duplexes are most active when containing two 2-nucleotide 3′-terminal nucleotide overhangs. Furthermore, substitution of one or both siRNA strands with 2′-deoxy or 2′-O-methyl nucleotides abolishes RNAi activity, whereas substitution of 3′-terminal siRNA nucleotides with deoxy nucleotides was shown to be tolerated. Mismatch sequences in the center of the siRNA duplex were also shown to abolish RNAi activity. In addition, these studies also indicate that the position of the cleavage site in the target RNA is defined by the 5′-end of the siRNA guide sequence rather than the 3′-end (Elbashir et al., 2001, EMBO J, 20, 6877). Other studies have indicated that a 5′-phosphate on the target-complementary strand of a siRNA duplex is required for siRNA activity and that ATP is utilized to maintain the 5′-phosphate moiety on the siRNA (Nykanen et al., 2001, Cell, 107, 309); however, siRNA molecules lacking a 5′-phosphate are active when introduced exogenously, suggesting that 5′-phosphorylation of siRNA constructs may occur in vivo.

Synthesis of Nucleic Acid Molecules

[0291] Synthesis of nucleic acids greater than 100 nucleotides in length is difficult using automated methods, and the therapeutic cost of such molecules is prohibitive. In this invention, small nucleic acid motifs (“small” refers to nucleic acid motifs no more than 100 nucleotides in length, preferably no more than 80 nucleotides in length, and most preferably no more than 50 nucleotides in length; e.g., individual siNA oligonucleotide sequences or siNA sequences synthesized in tandem) are preferably used for exogenous delivery. The simple structure of these molecules increases the ability of the nucleic acid to invade targeted regions of protein and/or RNA structure. Exemplary molecules of the instant invention are chemically synthesized, and others can similarly be synthesized.

[0292] Oligonucleotides (e.g., certain modified oligonucleotides or portions of oligonucleotides lacking ribonucleotides) are synthesized using protocols known in the art, for example as described in Caruthers et al., 1992, Methods in Enzymology 211, 3-19, Thompson et al., International PCT Publication No. WO 99/54459, Wincott et al., 1995, Nucleic Acids Res. 23, 2677-2684, Wincott et al., 1997, Methods Mol. Bio., 74, 59, Brennan et al., 1998, Biotechnol Bioeng., 61, 33-45, and Brennan, U.S. Pat. No. 6,001,311. All of these references are incorporated herein by reference. The synthesis of oligonucleotides makes use of common nucleic acid protecting and coupling groups, such as dimethoxytrityl at the 5′-end, and phosphoramidites at the 3′-end. In a non-limiting example, small scale syntheses are conducted on a 394 Applied Biosystems, Inc. synthesizer using a 0.2 μmol scale protocol with a 2.5 min coupling step for 2′-O-methylated nucleotides and a 45 second coupling step for 2′-deoxy nucleotides or 2′-deoxy-2′-fluoro nucleotides. Table V outlines the amounts and the contact times of the reagents used in the synthesis cycle. Alternatively, syntheses at the 0.2 μmol scale can be performed on a 96-well plate synthesizer, such as the instrument produced by Protogene (Palo Alto, Calif.) with minimal modification to the cycle. A 33-fold excess (60 μL of 0.11 M=6.6 μmol) of 2′-O-methyl phosphoramidite and a 105-fold excess of S-ethyl tetrazole (60 μL of 0.25 M=15 μmol) can be used in each coupling cycle of 2′-O-methyl residues relative to polymer-bound 5′-hydroxyl. A 22-fold excess (40 μL of 0.11 M=4.4 μmol) of deoxy phosphoramidite and a 70-fold excess of S-ethyl tetrazole (40 μL of 0.25 M=10 μmol) can be used in each coupling cycle of deoxy residues relative to polymer-bound 5′-hydroxyl. Average coupling yields on the 394 Applied Biosystems, Inc. synthesizer, determined by calorimetric quantitation of the trityl fractions, are typically 97.5-99%. Other oligonucleotide synthesis reagents for the 394 Applied Biosystems, Inc. synthesizer include the following: detritylation solution is 3% TCA in methylene chloride (ABI); capping is performed with 16% N-methyl imidazole in THF (ABI) and 10% acetic anhydride/10% 2,6-lutidine in THF (ABI); and oxidation solution is 16.9 mM I₂, 49 mM pyridine, 9% water in THF (PerSeptive Biosystems, Inc.). Burdick & Jackson Synthesis Grade acetonitrile is used directly from the reagent bottle. S-Ethyltetrazole solution (0.25 M in acetonitrile) is made up from the solid obtained from American International Chemical, Inc. Alternately, for the introduction of phosphorothioate linkages, Beaucage reagent (3H-1,2-Benzodithiol-3-one 1,1-dioxide, 0.05 M in acetonitrile) is used.

[0293] Deprotection of the DNA-based oligonucleotides is performed as follows: the polymer-bound trityl-on oligoribonucleotide is transferred to a 4 mL glass screw top vial and suspended in a solution of 40% aqueous methylamine (1 mL) at 65° C. for 10 minutes. After cooling to −20° C., the supernatant is removed from the polymer support. The support is washed three times with 1.0 mL of EtOH:MeCN:H2O/3:1:1, vortexed and the supernatant is then added to the first supernatant. The combined supernatants, containing the oligoribonucleotide, are dried to a white powder.

[0294] The method of synthesis used for RNA including certain siNA molecules of the invention follows the procedure as described in Usman et al., 1987, J. Am. Chem. Soc., 109, 7845; Scaringe et al., 1990, Nucleic Acids Res., 18, 5433; and Wincott et al., 1995, Nucleic Acids Res. 23, 2677-2684 Wincott et al., 1997, Methods Mol. Bio., 74, 59, and makes use of common nucleic acid protecting and coupling groups, such as dimethoxytrityl at the 5′-end, and phosphoramidites at the 3′-end. In a non-limiting example, small scale syntheses are conducted on a 394 Applied Biosystems, Inc. synthesizer using a 0.2 μmol scale protocol with a 7.5 min coupling step for alkylsilyl protected nucleotides and a 2.5 min coupling step for 2′-O-methylated nucleotides. Table V outlines the amounts and the contact times of the reagents used in the synthesis cycle. Alternatively, syntheses at the 0.2 μmol scale can be done on a 96-well plate synthesizer, such as the instrument produced by Protogene (Palo Alto, Calif.) with minimal modification to the cycle. A 33-fold excess (60 μL of 0.11 M=6.6 μmol) of 2′-O-methyl phosphoramidite and a 75-fold excess of S-ethyl tetrazole (60 μL of 0.25 M=15 μmol) can be used in each coupling cycle of 2′-O-methyl residues relative to polymer-bound 5′-hydroxyl. A 66-fold excess (120 μL of 0.11 M=13.2 μmol) of alkylsilyl (ribo) protected phosphoramidite and a 150-fold excess of S-ethyl tetrazole (120 μL of 0.25 M=30 μmol) can be used in each coupling cycle of ribo residues relative to polymer-bound 5′-hydroxyl. Average coupling yields on the 394 Applied Biosystems, Inc. synthesizer, determined by colorimetric quantitation of the trityl fractions, are typically 97.5-99%. Other oligonucleotide synthesis reagents for the 394 Applied Biosystems, Inc. synthesizer include the following: detritylation solution is 3% TCA in methylene chloride (ABI); capping is performed with 16% N-methyl imidazole in THF (ABI) and 10% acetic anhydride/10% 2,6-lutidine in THF (ABI); oxidation solution is 16.9 mM I₂, 49 mM pyridine, 9% water in THF (PerSeptive Biosystems, Inc.). Burdick & Jackson Synthesis Grade acetonitrile is used directly from the reagent bottle. S-Ethyltetrazole solution (0.25 M in acetonitrile) is made up from the solid obtained from American International Chemical, Inc. Alternately, for the introduction of phosphorothioate linkages, Beaucage reagent (3H-1,2-Benzodithiol-3-one 1,1-dioxide0.05 M in acetonitrile) is used.

[0295] Deprotection of the RNA is performed using either a two-pot or one-pot protocol. For the two-pot protocol, the polymer-bound trityl-on oligoribonucleotide is transferred to a 4 mL glass screw top vial and suspended in a solution of 40% aq. methylamine (1 mL) at 65° C. for 10 min. After cooling to −20° C., the supernatant is removed from the polymer support. The support is washed three times with 1.0 mL of EtOH:MeCN:H2O/3:1:1, vortexed and the supernatant is then added to the first supernatant. The combined supernatants, containing the oligoribonucleotide, are dried to a white powder. The base deprotected oligoribonucleotide is resuspended in anhydrous TEA/HF/NMP solution (300 μL of a solution of 1.5 mL N-methylpyrrolidinone, 750 μL TEA and 1 mL TEA•3HF to provide a 1.4 M HF concentration) and heated to 65° C. After 1.5 h, the oligomer is quenched with 1.5 M NH₄HCO₃.

[0296] Alternatively, for the one-pot protocol, the polymer-bound trityl-on oligoribonucleotide is transferred to a 4 mL glass screw top vial and suspended in a solution of 33% ethanolic methylamine/DMSO: 1/1 (0.8 mL) at 65° C. for 15 minutes. The vial is brought to room temperature TEA•3HF (0.1 mL) is added and the vial is heated at 65° C. for 15 minutes. The sample is cooled at −20° C. and then quenched with 1.5 M NH₄HCO₃.

[0297] For purification of the trityl-on oligomers, the quenched NH₄HCO₃ solution is loaded onto a C-18 containing cartridge that had been prewashed with acetonitrile followed by 50 mM TEAA. After washing the loaded cartridge with water, the RNA is detritylated with 0.5% TFA for 13 minutes. The cartridge is then washed again with water, salt exchanged with 1 M NaCl and washed with water again. The oligonucleotide is then eluted with 30% acetonitrile.

[0298] The average stepwise coupling yields are typically >98% (Wincott et al., 1995 Nucleic Acids Res. 23, 2677-2684). Those of ordinary skill in the art will recognize that the scale of synthesis can be adapted to be larger or smaller than the example described above including but not limited to 96-well format.

[0299] Alternatively, the nucleic acid molecules of the present invention can be synthesized separately and joined together post-synthetically, for example, by ligation (Moore et al., 1992, Science 256, 9923; Draper et al., International PCT publication No. WO 93/23569; Shabarova et al., 1991, Nucleic Acids Research 19, 4247; Bellon et al., 1997, Nucleosides & Nucleotides, 16, 951; Bellon et al., 1997, Bioconjugate Chem. 8, 204), or by hybridization following synthesis and/or deprotection.

[0300] The siNA molecules of the invention can also be synthesized via a tandem synthesis methodology as described in Example 1 herein, wherein both siNA strands are synthesized as a single contiguous oligonucleotide fragment or strand separated by a cleavable linker which is subsequently cleaved to provide separate siNA fragments or strands that hybridize and permit purification of the siNA duplex. The linker can be a polynucleotide linker or a non-nucleotide linker. The tandem synthesis of siNA as described herein can be readily adapted to both multiwell/multiplate synthesis platforms such as 96 well or similarly larger multi-well platforms. The tandem synthesis of siNA as described herein can also be readily adapted to large scale synthesis platforms employing batch reactors, synthesis columns and the like.

[0301] A siNA molecule can also be assembled from two distinct nucleic acid strands or fragments wherein one fragment includes the sense region and the second fragment includes the antisense region of the RNA molecule.

[0302] The nucleic acid molecules of the present invention can be modified extensively to enhance stability by modification with nuclease resistant groups, for example, 2′-amino, 2′-C-allyl, 2′-fluoro, 2′-O-methyl, 2′-H (for a review see Usman and Cedergren, 1992, TIBS 17, 34; Usman et al., 1994, Nucleic Acids Symp. Ser. 31, 163). siNA constructs can be purified by gel electrophoresis using general methods or can be purified by high pressure liquid chromatography (HPLC; see Wincott et al., supra, the totality of which is hereby incorporated herein by reference) and re-suspended in water.

[0303] In another aspect of the invention, siNA molecules of the invention are expressed from transcription units inserted into DNA or RNA vectors. The recombinant vectors can be DNA plasmids or viral vectors. siNA expressing viral vectors can be constructed based on, but not limited to, adeno-associated virus, retrovirus, adenovirus, or alphavirus. The recombinant vectors capable of expressing the siNA molecules can be delivered as described herein, and persist in target cells. Alternatively, viral vectors can be used that provide for transient expression of siNA molecules.

Optimizing Activity of the Nucleic Acid Molecule of the Invention.

[0304] Chemically synthesizing nucleic acid molecules with modifications (base, sugar and/or phosphate) can prevent their degradation by serum ribonucleases, which can increase their potency (see e.g., Eckstein et al., International Publication No. WO 92/07065; Perrault et al., 1990 Nature 344, 565; Pieken et al., 1991, Science 253, 314; Usman and Cedergren, 1992, Trends in Biochem. Sci. 17, 334; Usman et al., International Publication No. WO 93/15187; and Rossi et al., International Publication No. WO 91/03162; Sproat, U.S. Pat. No. 5,334,711; Gold et al., U.S. Pat. No. 6,300,074; and Burgin et al., supra; all of which are incorporated by reference herein). All of the above references describe various chemical modifications that can be made to the base, phosphate and/or sugar moieties of the nucleic acid molecules described herein. Modifications that enhance their efficacy in cells, and removal of bases from nucleic acid molecules to shorten oligonucleotide synthesis times and reduce chemical requirements are desired.

[0305] There are several examples in the art describing sugar, base and phosphate modifications that can be introduced into nucleic acid molecules with significant enhancement in their nuclease stability and efficacy. For example, oligonucleotides are modified to enhance stability and/or enhance biological activity by modification with nuclease resistant groups, for example, 2′-amino, 2′-C-allyl, 2′-fluoro, 2′-O-methyl, 2′-O-allyl, 2′-H, nucleotide base modifications (for a review see Usman and Cedergren, 1992, TIBS. 17, 34; Usman et al., 1994, Nucleic Acids Symp. Ser. 31, 163; Burgin et al., 1996, Biochemistry, 35, 14090). Sugar modification of nucleic acid molecules have been extensively described in the art (see Eckstein et al., International Publication PCT No. WO 92/07065; Perrault et al. Nature, 1990, 344, 565-568; Pieken et al. Science, 1991, 253, 314-317; Usman and Cedergren, Trends in Biochem. Sci., 1992, 17, 334-339; Usman et al. International Publication PCT No. WO 93/15187; Sproat, U.S. Pat. No. 5,334,711 and Beigelman et al., 1995, J. Biol. Chem., 270, 25702; Beigelman et al., International PCT publication No. WO 97/26270; Beigelman et al., U.S. Pat. No. 5,716,824; Usman et al., U.S. Pat. No. 5,627,053; Woolf et al., International PCT Publication No. WO 98/13526; Thompson et al., U.S. Ser. No. 60/082,404 which was filed on Apr. 20, 1998; Karpeisky et al., 1998, Tetrahedron Lett., 39, 1131; Earnshaw and Gait, 1998, Biopolymers (Nucleic Acid Sciences), 48, 39-55; Verma and Eckstein, 1998, Annu. Rev. Biochem., 67, 99-134; and Burlina et al., 1997, Bioorg. Med. Chem., 5, 1999-2010; all of the references are hereby incorporated in their totality by reference herein). Such publications describe general methods and strategies to determine the location of incorporation of sugar, base and/or phosphate modifications and the like into nucleic acid molecules without modulating catalysis, and are incorporated by reference herein. In view of such teachings, similar modifications can be used as described herein to modify the siNA nucleic acid molecules of the instant invention so long as the ability of siNA to promote RNAi is cells is not significantly inhibited.

[0306] While chemical modification of oligonucleotide internucleotide linkages with phosphorothioate, phosphorodithioate, and/or 5′-methylphosphonate linkages improves stability, excessive modifications can cause some toxicity or decreased activity. Therefore, when designing nucleic acid molecules, the amount of these internucleotide linkages should be minimized. The reduction in the concentration of these linkages should lower toxicity, resulting in increased efficacy and higher specificity of these molecules.

[0307] Short interfering nucleic acid (siNA) molecules having chemical modifications that maintain or enhance activity are provided. Such a nucleic acid is also generally more resistant to nucleases than an unmodified nucleic acid. Accordingly, the in vitro and/or in vivo activity should not be significantly lowered. In cases in which modulation is the goal, therapeutic nucleic acid molecules delivered exogenously should optimally be stable within cells until translation of the target RNA has been modulated long enough to reduce the levels of the undesirable protein. This period of time varies between hours to days depending upon the disease state. Improvements in the chemical synthesis of RNA and DNA (Wincott et al., 1995, Nucleic Acids Res. 23, 2677; Caruthers et al., 1992, Methods in Enzymology 211, 3-19 (incorporated by reference herein)) have expanded the ability to modify nucleic acid molecules by introducing nucleotide modifications to enhance their nuclease stability, as described above.

[0308] In one embodiment, nucleic acid molecules of the invention include one or more (e.g., about 1, 2, 3, 4, 5, 6, 7, 8, 9, 10, or more) G-clamp nucleotides. A G-clamp nucleotide is a modified cytosine analog wherein the modifications confer the ability to hydrogen bond both Watson-Crick and Hoogsteen faces of a complementary guanine within a duplex, see for example Lin and Matteucci, 1998, J. Am. Chem. Soc., 120, 8531-8532. A single G-clamp analog substitution within an oligonucleotide can result in substantially enhanced helical thermal stability and mismatch discrimination when hybridized to complementary oligonucleotides. The inclusion of such nucleotides in nucleic acid molecules of the invention results in both enhanced affinity and specificity to nucleic acid targets, complementary sequences, or template strands. In another embodiment, nucleic acid molecules of the invention include one or more (e.g., about 1, 2, 3, 4, 5, 6, 7, 8, 9, 10, or more) LNA “locked nucleic acid” nucleotides such as a 2′,4′-C methylene bicyclo nucleotide (see for example Wengel et al., International PCT Publication No. WO 00/66604 and WO 99/14226).

[0309] In another embodiment, the invention features conjugates and/or complexes of siNA molecules of the invention. Such conjugates and/or complexes can be used to facilitate delivery of siNA molecules into a biological system, such as a cell. The conjugates and complexes provided by the instant invention can impart therapeutic activity by transferring therapeutic compounds across cellular membranes, altering the pharmacokinetics, and/or modulating the localization of nucleic acid molecules of the invention. The present invention encompasses the design and synthesis of novel conjugates and complexes for the delivery of molecules, including, but not limited to, small molecules, lipids, cholesterol, phospholipids, nucleosides, nucleotides, nucleic acids, antibodies, toxins, negatively charged polymers and other polymers, for example proteins, peptides, hormones, carbohydrates, polyethylene glycols, or polyamines, across cellular membranes. In general, the transporters described are designed to be used either individually or as part of a multi-component system, with or without degradable linkers. These compounds are expected to improve delivery and/or localization of nucleic acid molecules of the invention into a number of cell types originating from different tissues, in the presence or absence of serum (see Sullenger and Cech, U.S. Pat. No. 5,854,038). Conjugates of the molecules described herein can be attached to biologically active molecules via linkers that are biodegradable, such as biodegradable nucleic acid linker molecules.

[0310] The term “biodegradable linker” as used herein, refers to a nucleic acid or non-nucleic acid linker molecule that is designed as a biodegradable linker to connect one molecule to another molecule, for example, a biologically active molecule to a siNA molecule of the invention or the sense and antisense strands of a siNA molecule of the invention. The biodegradable linker is designed such that its stability can be modulated for a particular purpose, such as delivery to a particular tissue or cell type. The stability of a nucleic acid-based biodegradable linker molecule can be modulated by using various chemistries, for example combinations of ribonucleotides, deoxyribonucleotides, and chemically-modified nucleotides, such as 2′-O-methyl, 2′-fluoro, 2′-amino, 2′-O-amino, 2′-C-allyl, 2′-O-allyl, and other 2′-modified or base modified nucleotides. The biodegradable nucleic acid linker molecule can be a dimer, trimer, tetramer or longer nucleic acid molecule, for example, an oligonucleotide of about 2, 3, 4, 5, 6, 7, 8, 9, 10, 11, 12, 13, 14, 15, 16, 17, 18, 19, or 20 nucleotides in length, or can comprise a single nucleotide with a phosphorus-based linkage, for example, a phosphoramidate or phosphodiester linkage. The biodegradable nucleic acid linker molecule can also comprise nucleic acid backbone, nucleic acid sugar, or nucleic acid base modifications.

[0311] The term “biodegradable” as used herein, refers to degradation in a biological system, for example, enzymatic degradation or chemical degradation.

[0312] The term “biologically active molecule” as used herein refers to compounds or molecules that are capable of eliciting or modifying a biological response in a system. Non-limiting examples of biologically active siNA molecules either alone or in combination with other molecules contemplated by the instant invention include therapeutically active molecules such as antibodies, cholesterol, hormones, antivirals, peptides, proteins, chemotherapeutics, small molecules, vitamins, co-factors, nucleosides, nucleotides, oligonucleotides, enzymatic nucleic acids, antisense nucleic acids, triplex forming oligonucleotides, 2,5-A chimeras, siNA, dsRNA, allozymes, aptamers, decoys and analogs thereof. Biologically active molecules of the invention also include molecules capable of modulating the pharmacokinetics and/or pharmacodynamics of other biologically active molecules, for example, lipids and polymers such as polyamines, polyamides, polyethylene glycol and other polyethers.

[0313] The term “phospholipid” as used herein, refers to a hydrophobic molecule comprising at least one phosphorus group. For example, a phospholipid can comprise a phosphorus-containing group and saturated or unsaturated alkyl group, optionally substituted with OH, COOH, oxo, amine, or substituted or unsubstituted aryl groups.

[0314] Therapeutic nucleic acid molecules (e.g., siNA molecules) delivered exogenously optimally are stable within cells until reverse transcription of the RNA has been modulated long enough to reduce the levels of the RNA transcript. The nucleic acid molecules are resistant to nucleases in order to function as effective intracellular therapeutic agents. Improvements in the chemical synthesis of nucleic acid molecules described in the instant invention and in the art have expanded the ability to modify nucleic acid molecules by introducing nucleotide modifications to enhance their nuclease stability as described above.

[0315] In yet another embodiment, siNA molecules having chemical modifications that maintain or enhance enzymatic activity of proteins involved in RNAi are provided. Such nucleic acids are also generally more resistant to nucleases than unmodified nucleic acids. Thus, in vitro and/or in vivo the activity should not be significantly lowered.

[0316] Use of the nucleic acid-based molecules of the invention will lead to better treatments by affording the possibility of combination therapies (e.g., multiple siNA molecules targeted to different genes; nucleic acid molecules coupled with known small molecule modulators; or intermittent treatment with combinations of molecules, including different motifs and/or other chemical or biological molecules). The treatment of subjects with siNA molecules can also include combinations of different types of nucleic acid molecules, such as enzymatic nucleic acid molecules (ribozymes), allozymes, antisense, 2,5-A oligoadenylate, decoys, and aptamers.

[0317] In another aspect a siNA molecule of the invention comprises one or more 5′ and/or a 3′-cap structure, for example, on only the sense siNA strand, the antisense siNA strand, or both siNA strands.

[0318] By “cap structure” is meant chemical modifications, which have been incorporated at either terminus of the oligonucleotide (see, for example, Adamic et al., U.S. Pat. No. 5,998,203, incorporated by reference herein). These terminal modifications protect the nucleic acid molecule from exonuclease degradation, and may help in delivery and/or localization within a cell. The cap may be present at the 5′-terminus (5′-cap) or at the 3′-terminal (3′-cap) or may be present on both termini. In non-limiting examples, the 5′-cap includes, but is not limited to, glyceryl, inverted deoxy abasic residue (moiety); 4′,5′-methylene nucleotide; 1-(beta-D-erythrofuranosyl) nucleotide, 4′-thio nucleotide; carbocyclic nucleotide; 1,5-anhydrohexitol nucleotide; L-nucleotides; alpha-nucleotides; modified base nucleotide; phosphorodithioate linkage; threo-pentofuranosyl nucleotide; acyclic 3′,4′-seco nucleotide; acyclic 3,4-dihydroxybutyl nucleotide; acyclic 3,5-dihydroxypentyl nucleotide, 3′-3′-inverted nucleotide moiety; 3′-3′-inverted abasic moiety; 3′-2′-inverted nucleotide moiety; 3′-2′-inverted abasic moiety; 1,4-butanediol phosphate; 3′-phosphoramidate; hexylphosphate; aminohexyl phosphate; 3′-phosphate; 3′-phosphorothioate; phosphorodithioate; or bridging or non-bridging methylphosphonate moiety. Non-limiting examples of cap moieties are shown in FIG. 10.

[0319] Non-limiting examples of the 3′-cap include, but are not limited to, glyceryl, inverted deoxy abasic residue (moiety), 4′,5′-methylene nucleotide; 1-(beta-D-erythrofuranosyl) nucleotide; 4′-thio nucleotide, carbocyclic nucleotide; 5′-amino-alkyl phosphate; 1,3-diamino-2-propyl phosphate; 3-aminopropyl phosphate; 6-aminohexyl phosphate; 1,2-aminododecyl phosphate; hydroxypropyl phosphate; 1,5-anhydrohexitol nucleotide; L-nucleotide; alpha-nucleotide; modified base nucleotide; phosphorodithioate; threo-pentofuranosyl nucleotide; acyclic 3′,4′-seco nucleotide; 3,4-dihydroxybutyl nucleotide; 3,5-dihydroxypentyl nucleotide, 5′-5′-inverted nucleotide moiety; 5′-5′-inverted abasic moiety; 5′-phosphoramidate; 5′-phosphorothioate; 1,4-butanediol phosphate; 5′-amino; bridging and/or non-bridging 5′-phosphoramidate, phosphorothioate and/or phosphorodithioate, bridging or non bridging methylphosphonate and 5′-mercapto moieties (for more details see Beaucage and Iyer, 1993, Tetrahedron 49, 1925; incorporated by reference herein).

[0320] By the term “non-nucleotide” is meant any group or compound which can be incorporated into a nucleic acid chain in the place of one or more nucleotide units, including either sugar and/or phosphate substitutions, and allows the remaining bases to exhibit their enzymatic activity. The group or compound is abasic in that it does not contain a commonly recognized nucleotide base, such as adenosine, guanine, cytosine, uracil or thymine and therefore lacks a base at the 1′-position.

[0321] An “alkyl” group refers to a saturated aliphatic hydrocarbon, including straight-chain, branched-chain, and cyclic alkyl groups. Preferably, the alkyl group has 1 to 12 carbons. More preferably, it is a lower alkyl of from 1 to 7 carbons, more preferably 1 to 4 carbons. The alkyl group can be substituted or unsubstituted. When substituted the substituted group(s) is preferably, hydroxyl, cyano, alkoxy, ═O, ═S, NO₂ or N(CH₃)₂, amino, or SH. The term also includes alkenyl groups that are unsaturated hydrocarbon groups containing at least one carbon-carbon double bond, including straight-chain, branched-chain, and cyclic groups. Preferably, the alkenyl group has 1 to 12 carbons. More preferably, it is a lower alkenyl of from 1 to 7 carbons, more preferably 1 to 4 carbons. The alkenyl group may be substituted or unsubstituted. When substituted the substituted group(s) is preferably, hydroxyl, cyano, alkoxy, ═O, ═S, NO₂, halogen, N(CH₃)₂, amino, or SH. The term “alkyl” also includes alkynyl groups that have an unsaturated hydrocarbon group containing at least one carbon-carbon triple bond, including straight-chain, branched-chain, and cyclic groups. Preferably, the alkynyl group has 1 to 12 carbons. More preferably, it is a lower alkynyl of from 1 to 7 carbons, more preferably 1 to 4 carbons. The alkynyl group may be substituted or unsubstituted. When substituted the substituted group(s) is preferably, hydroxyl, cyano, alkoxy, ═O, ═S, NO₂ or N(CH₃)₂, amino or SH.

[0322] Such alkyl groups can also include aryl, alkylaryl, carbocyclic aryl, heterocyclic aryl, amide and ester groups. An “aryl” group refers to an aromatic group that has at least one ring having a conjugated pi electron system and includes carbocyclic aryl, heterocyclic aryl and biaryl groups, all of which may be optionally substituted. The preferred substituent(s) of aryl groups are halogen, trihalomethyl, hydroxyl, SH, OH, cyano, alkoxy, alkyl, alkenyl, alkynyl, and amino groups. An “alkylaryl” group refers to an alkyl group (as described above) covalently joined to an aryl group (as described above). Carbocyclic aryl groups are groups wherein the ring atoms on the aromatic ring are all carbon atoms. The carbon atoms are optionally substituted. Heterocyclic aryl groups are groups having from 1 to 3 heteroatoms as ring atoms in the aromatic ring and the remainder of the ring atoms are carbon atoms. Suitable heteroatoms include oxygen, sulfur, and nitrogen, and include furanyl, thienyl, pyridyl, pyrrolyl, N-lower alkyl pyrrolo, pyrimidyl, pyrazinyl, imidazolyl and the like, all optionally substituted. An “amide” refers to an —C(O)—NH—R, where R is either alkyl, aryl, alkylaryl or hydrogen. An “ester” refers to an —C(O)—OR′, where R is either alkyl, aryl, alkylaryl or hydrogen.

[0323] By “nucleotide” as used herein is as recognized in the art to include natural bases (standard), and modified bases well known in the art. Such bases are generally located at the 1′ position of a nucleotide sugar moiety. Nucleotides generally comprise a base, sugar and a phosphate group. The nucleotides can be unmodified or modified at the sugar, phosphate and/or base moiety, (also referred to interchangeably as nucleotide analogs, modified nucleotides, non-natural nucleotides, non-standard nucleotides and other; see, for example, Usman and McSwiggen, supra; Eckstein et al., International PCT Publication No. WO 92/07065; Usman et al., International PCT Publication No. WO 93/15187; Uhlman & Peyman, supra, all are hereby incorporated by reference herein). There are several examples of modified nucleic acid bases known in the art as summarized by Limbach et al., 1994, Nucleic Acids Res. 22, 2183. Some of the non-limiting examples of base modifications that can be introduced into nucleic acid molecules include, inosine, purine, pyridin-4-one, pyridin-2-one, phenyl, pseudouracil, 2,4,6-trimethoxy benzene, 3-methyl uracil, dihydrouridine, naphthyl, aminophenyl, 5-alkylcytidines (e.g., 5-methylcytidine), 5-alkyluridines (e.g., ribothymidine), 5-halouridine (e.g., 5-bromouridine) or 6-azapyrimidines or 6-alkylpyrimidines (e.g. 6-methyluridine), propyne, and others (Burgin et al., 1996, Biochemistry, 35, 14090; Uhlman & Peyman, supra). By “modified bases” in this aspect is meant nucleotide bases other than adenine, guanine, cytosine and uracil at 1′ position or their equivalents.

[0324] In one embodiment, the invention features modified siNA molecules, with phosphate backbone modifications comprising one or more phosphorothioate, phosphorodithioate, methylphosphonate, phosphotriester, morpholino, amidate carbamate, carboxymethyl, acetamidate, polyamide, sulfonate, sulfonamide, sulfamate, formacetal, thioformacetal, and/or alkylsilyl, substitutions. For a review of oligonucleotide backbone modifications, see Hunziker and Leumann, 1995, Nucleic Acid Analogues: Synthesis and Properties, in Modern Synthetic Methods, VCH, 331-417, and Mesmaeker et al., 1994, Novel Backbone Replacements for Oligonucleotides, in Carbohydrate Modifications in Antisense Research, ACS, 24-39.

[0325] By “abasic” is meant sugar moieties lacking a base or having other chemical groups in place of a base at the 1′ position, see for example Adamic et al., U.S. Pat. No. 5,998,203.

[0326] By “unmodified nucleoside” is meant one of the bases adenine, cytosine, guanine, thymine, or uracil joined to the 1′ carbon of β-D-ribo-furanose.

[0327] By “modified nucleoside” is meant any nucleotide base which contains a modification in the chemical structure of an unmodified nucleotide base, sugar and/or phosphate. Non-limiting examples of modified nucleotides are shown by Formulae I-VII and/or other modifications described herein.

[0328] In connection with 2′-modified nucleotides as described for the present invention, by “amino” is meant 2′-NH₂ or 2′-O—NH₂, which can be modified or unmodified. Such modified groups are described, for example, in Eckstein et al., U.S. Pat. No. 5,672,695 and Matulic-Adamic et al., U.S. Pat. No. 6,248,878, which are both incorporated by reference in their entireties.

[0329] Various modifications to nucleic acid siNA structure can be made to enhance the utility of these molecules. Such modifications will enhance shelf-life, half-life in vitro, stability, and ease of introduction of such oligonucleotides to the target site, e.g., to enhance penetration of cellular membranes, and confer the ability to recognize and bind to targeted cells.

Administration of Nucleic Acid Molecules

[0330] A siNA molecule of the invention can be adapted for use to prevent or treat cancer, inflammatory, respiratory, autoimmune, cardiovascular, neurological, and/or proliferative diseases, conditions, or disorders, and/or any other trait, disease, disorder or condition that is related to or will respond to the levels of interleukin and/or interleukin receptor in a cell or tissue, alone or in combination with other therapies. For example, a siNA molecule can comprise a delivery vehicle, including liposomes, for administration to a subject, carriers and diluents and their salts, and/or can be present in pharmaceutically acceptable formulations. Methods for the delivery of nucleic acid molecules are described in Akhtar et al., 1992, Trends Cell Bio., 2, 139; Delivery Strategies for Antisense Oligonucleotide Therapeutics, ed. Akhtar, 1995, Maurer et al., 1999, Mol. Membr. Biol., 16, 129-140; Hofland and Huang, 1999, Handb. Exp. Pharmacol., 137, 165-192; and Lee et al., 2000, ACS Symp. Ser., 752, 184-192, all of which are incorporated herein by reference. Beigelman et al., U.S. Pat. No. 6,395,713 and Sullivan et al., PCT WO 94/02595 further describe the general methods for delivery of nucleic acid molecules. These protocols can be utilized for the delivery of virtually any nucleic acid molecule. Nucleic acid molecules can be administered to cells by a variety of methods known to those of skill in the art, including, but not restricted to, encapsulation in liposomes, by iontophoresis, or by incorporation into other vehicles, such as biodegradable polymers, hydrogels, cyclodextrins (see for example Gonzalez et al., 1999, Bioconjugate Chem., 10, 1068-1074; Wang et al., International PCT publication Nos. WO 03/47518 and WO 03/46185), poly(lactic-co-glycolic)acid (PLGA) and PLCA microspheres (see for example U.S. Pat. No. 6,447,796 and U.S. Patent Application Publication No. U.S. 2002130430), biodegradable nanocapsules, and bioadhesive microspheres, or by proteinaceous vectors (O'Hare and Normand, International PCT Publication No. WO 00/53722). Alternatively, the nucleic acid/vehicle combination is locally delivered by direct injection or by use of an infusion pump. Direct injection of the nucleic acid molecules of the invention, whether subcutaneous, intramuscular, or intradermal, can take place using standard needle and syringe methodologies, or by needle-free technologies such as those described in Conry et al., 1999, Clin. Cancer Res., 5, 2330-2337 and Barry et al., International PCT Publication No. WO 99/31262. The molecules of the instant invention can be used as pharmaceutical agents. Pharmaceutical agents prevent, modulate the occurrence, or treat (alleviate a symptom to some extent, preferably all of the symptoms) of a disease state in a subject.

[0331] In another embodiment, the nucleic acid molecules of the invention can also be formulated or complexed with polyethyleneimine and derivatives thereof, such as polyethyleneimine-polyethyleneglycol-N-acetylgalactosamine (PEI-PEG-GAL) or polyethyleneimine-polyethyleneglycol-tri-N-acetylgalactosamine (PEI-PEG-triGAL) derivatives. In one embodiment, the nucleic acid molecules of the invention are formulated as described in U.S. Patent Application Publication No. 20030077829, incorporated by reference herein in its entirety.

[0332] In one embodiment, a siNA molecule of the invention is complexed with membrane disruptive agents such as those described in U.S. Patent Application Publication No. 20010007666, incorporated by reference herein in its entirety including the drawings. In another embodiment, the membrane disruptive agent or agents and the siNA molecule are also complexed with a cationic lipid or helper lipid molecule, such as those lipids described in U.S. Pat. No. 6,235,310, incorporated by reference herein in its entirety including the drawings.

[0333] In one embodiment, a siNA molecule of the invention is complexed with delivery systems as described in U.S. Patent Application Publication No. 2003077829 and International PCT Publication Nos. WO 00/03683 and WO 02/087541, all incorporated by reference herein in their entirety including the drawings.

[0334] In one embodiment, the nucleic acid molecules of the invention are administered via pulmonary delivery, such as by inhalation of an aerosol or spray dried formulation administered by an inhalation device or nebulizer, providing rapid local uptake of the nucleic acid molecules into relevant pulmonary tissues. Solid particulate compositions containing respirable dry particles of micronized nucleic acid compositions can be prepared by grinding dried or lyophilized nucleic acid compositions, and then passing the micronized composition through, for example, a 400 mesh screen to break up or separate out large agglomerates. A solid particulate composition comprising the nucleic acid compositions of the invention can optionally contain a dispersant which serves to facilitate the formation of an aerosol as well as other therapeutic compounds. A suitable dispersant is lactose, which can be blended with the nucleic acid compound in any suitable ratio, such as a 1 to 1 ratio by weight.

[0335] Aerosols of liquid particles comprising a nucleic acid composition of the invention can be produced by any suitable means, such as with a nebulizer (see for example U.S. Pat. No. 4,501,729). Nebulizers are commercially available devices which transform solutions or suspensions of an active ingredient into a therapeutic aerosol mist either by means of acceleration of a compressed gas, typically air or oxygen, through a narrow venturi orifice or by means of ultrasonic agitation. Suitable formulations for use in nebulizers comprise the active ingredient in a liquid carrier in an amount of up to 40% w/w preferably less than 20% w/w of the formulation. The carrier is typically water or a dilute aqueous alcoholic solution, preferably made isotonic with body fluids by the addition of, for example, sodium chloride or other suitable salts. Optional additives include preservatives if the formulation is not prepared sterile, for example, methyl hydroxybenzoate, anti-oxidants, flavorings, volatile oils, buffering agents and emulsifiers and other formulation surfactants. The aerosols of solid particles comprising the active composition and surfactant can likewise be produced with any solid particulate aerosol generator. Aerosol generators for administering solid particulate therapeutics to a subject produce particles which are respirable, as explained above, and generate a volume of aerosol containing a predetermined metered dose of a therapeutic composition at a rate suitable for human administration. One illustrative type of solid particulate aerosol generator is an insufflator. Suitable formulations for administration by insufflation include finely comminuted powders which can be delivered by means of an insufflator. In the insufflator, the powder, e.g., a metered dose thereof effective to carry out the treatments described herein, is contained in capsules or cartridges, typically made of gelatin or plastic, which are either pierced or opened in situ and the powder delivered by air drawn through the device upon inhalation or by means of a manually-operated pump. The powder employed in the insufflator consists either solely of the active ingredient or of a powder blend comprising the active ingredient, a suitable powder diluent, such as lactose, and an optional surfactant. The active ingredient typically comprises from 0.1 to 100 w/w of the formulation. A second type of illustrative aerosol generator comprises a metered dose inhaler. Metered dose inhalers are pressurized aerosol dispensers, typically containing a suspension or solution formulation of the active ingredient in a liquified propellant. During use these devices discharge the formulation through a valve adapted to deliver a metered volume to produce a fine particle spray containing the active ingredient. Suitable propellants include certain chlorofluorocarbon compounds, for example, dichlorodifluoromethane, trichlorofluoromethane, dichlorotetrafluoroethane and mixtures thereof. The formulation can additionally contain one or more co-solvents, for example, ethanol, emulsifiers and other formulation surfactants, such as oleic acid or sorbitan trioleate, anti-oxidants and suitable flavoring agents. Other methods for pulmonary delivery are described in, for example U.S. Patent Application No. 20040037780, and U.S. Pat. Nos. 6,592,904; 6,582,728; 6,565,885.

[0336] In one embodiment, the invention features the use of methods to deliver the nucleic acid molecules of the instant invention to the central nervous system and/or peripheral nervous system. Experiments have demonstrated the efficient in vivo uptake of nucleic acids by neurons. As an example of local administration of nucleic acids to nerve cells, Sommer et al., 1998, Antisense Nuc. Acid Drug Dev., 8, 75, describe a study in which a 15mer phosphorothioate antisense nucleic acid molecule to c-fos is administered to rats via microinjection into the brain. Antisense molecules labeled with tetramethylrhodamine-isothiocyanate (TRITC) or fluorescein isothiocyanate (FITC) were taken up by exclusively by neurons thirty minutes post-injection. A diffuse cytoplasmic staining and nuclear staining was observed in these cells. As an example of systemic administration of nucleic acid to nerve cells, Epa et al., 2000, Antisense Nuc. Acid Drug Dev., 10, 469, describe an in vivo mouse study in which beta-cyclodextrin-adamantane-oligonucleotide conjugates were used to target the p75 neurotrophin receptor in neuronally differentiated PC12 cells. Following a two week course of IP administration, pronounced uptake of p75 neurotrophin receptor antisense was observed in dorsal root ganglion (DRG) cells. In addition, a marked and consistent down-regulation of p75 was observed in DRG neurons. Additional approaches to the targeting of nucleic acid to neurons are described in Broaddus et al., 1998, J. Neurosurg., 88(4), 734; Karle et al., 1997, Eur. J. Pharmocol., 340(2/3), 153; Bannai et al., 1998, Brain Research, 784(1,2), 304; Rajakumar et al., 1997, Synapse, 26(3), 199; Wu-pong et al., 1999, BioPharm, 12(1), 32; Bannai et al., 1998, Brain Res. Protoc., 3(1), 83; Simantov et al., 1996, Neuroscience, 74(1), 39. Nucleic acid molecules of the invention are therefore amenable to delivery to and uptake by cells that express repeat expansion allelic variants for modulation of RE gene expression. The delivery of nucleic acid molecules of the invention, targeting RE is provided by a variety of different strategies. Traditional approaches to CNS delivery that can be used include, but are not limited to, intrathecal and intracerebroventricular administration, implantation of catheters and pumps, direct injection or perfusion at the site of injury or lesion, injection into the brain arterial system, or by chemical or osmotic opening of the blood-brain barrier. Other approaches can include the use of various transport and carrier systems, for example though the use of conjugates and biodegradable polymers. Furthermore, gene therapy approaches, for example as described in Kaplitt et al., U.S. Pat. No. 6,180,613 and Davidson, WO 04/013280, can be used to express nucleic acid molecules in the CNS.

[0337] In one embodiment, nucleic acid molecules of the invention are administered to the central nervous system (CNS) or peripheral nervous system (PNS). Experiments have demonstrated the efficient in vivo uptake of nucleic acids by neurons. As an example of local administration of nucleic acids to nerve cells, Sommer et al., 1998, Antisense Nuc. Acid Drug Dev., 8, 75, describe a study in which a 15mer phosphorothioate antisense nucleic acid molecule to c-fos is administered to rats via microinjection into the brain. Antisense molecules labeled with tetramethylrhodamine-isothiocyanate (TRITC) or fluorescein isothiocyanate (FITC) were taken up by exclusively by neurons thirty minutes post-injection. A diffuse cytoplasmic staining and nuclear staining was observed in these cells. As an example of systemic administration of nucleic acid to nerve cells, Epa et al., 2000, Antisense Nuc. Acid Drug Dev., 10, 469, describe an in vivo mouse study in which beta-cyclodextrin-adamantane-oligonucleotide conjugates were used to target the p75 neurotrophin receptor in neuronally differentiated PC12 cells. Following a two week course of IP administration, pronounced uptake of p75 neurotrophin receptor antisense was observed in dorsal root ganglion (DRG) cells. In addition, a marked and consistent down-regulation of p75 was observed in DRG neurons. Additional approaches to the targeting of nucleic acid to neurons are described in Broaddus et al., 1998, J. Neurosurg., 88(4), 734; Karle et al., 1997, Eur. J. Pharmocol., 340(2/3), 153; Bannai et al., 1998, Brain Research, 784(1,2), 304; Rajakumar et al., 1997, Synapse, 26(3), 199; Wu-pong et al., 1999, BioPharm, 12(1), 32; Bannai et al., 1998, Brain Res. Protoc., 3(1), 83; Simantov et al., 1996, Neuroscience, 74(1), 39. Nucleic acid molecules of the invention are therefore amenable to delivery to and uptake by cells in the CNS and/or PNS.

[0338] The delivery of nucleic acid molecules of the invention to the CNS is provided by a variety of different strategies. Traditional approaches to CNS delivery that can be used include, but are not limited to, intrathecal and intracerebroventricular administration, implantation of catheters and pumps, direct injection or perfusion at the site of injury or lesion, injection into the brain arterial system, or by chemical or osmotic opening of the blood-brain barrier. Other approaches can include the use of various transport and carrier systems, for example though the use of conjugates and biodegradable polymers. Furthermore, gene therapy approaches, for example as described in Kaplitt et al., U.S. Pat. No. 6,180,613 and Davidson, WO 04/013280, can be used to express nucleic acid molecules in the CNS.

[0339] In one embodiment, delivery systems of the invention include, for example, aqueous and nonaqueous gels, creams, multiple emulsions, microemulsions, liposomes, ointments, aqueous and nonaqueous solutions, lotions, aerosols, hydrocarbon bases and powders, and can contain excipients such as solubilizers, permeation enhancers (e.g., fatty acids, fatty acid esters, fatty alcohols and amino acids), and hydrophilic polymers (e.g., polycarbophil and polyvinylpyrolidone). In one embodiment, the pharmaceutically acceptable carrier is a liposome or a transdermal enhancer. Examples of liposomes which can be used in this invention include the following: (1) CellFectin, 1:1.5 (M/M) liposome formulation of the cationic lipid N,NI,NII,NIII-tetramethyl-N,NI,NII,NIII-tetrapalmit-y-spermine and dioleoyl phosphatidylethanolamine (DOPE) (GIBCO BRL); (2) Cytofectin GSV, 2:1 (M/M) liposome formulation of a cationic lipid and DOPE (Glen Research); (3) DOTAP (N-[1-(2,3-dioleoyloxy)-N,N,N-tri-methyl-ammoniummethylsulfate) (Boehringer Manheim); and (4) Lipofectamine, 3:1 (M/M) liposome formulation of the polycationic lipid DOSPA and the neutral lipid DOPE (GIBCO BRL).

[0340] In one embodiment, delivery systems of the invention include patches, tablets, suppositories, pessaries, gels and creams, and can contain excipients such as solubilizers and enhancers (e.g., propylene glycol, bile salts and amino acids), and other vehicles (e.g., polyethylene glycol, fatty acid esters and derivatives, and hydrophilic polymers such as hydroxypropylmethylcellulose and hyaluronic acid).

[0341] In one embodiment, siNA molecules of the invention are formulated or complexed with polyethylenimine (e.g., linear or branched PEI) and/or polyethylenimine derivatives, including for example grafted PEIs such as galactose PEI, cholesterol PEI, antibody derivatized PEI, and polyethylene glycol PEI (PEG-PEI) derivatives thereof (see for example Ogris et al., 2001, AAPA PharmSci, 3, 1-11; Furgeson et al., 2003, Bioconjugate Chem., 14, 840-847; Kunath et al., 2002, Phramaceutical Research, 19, 810-817; Choi et al., 2001, Bull. Korean Chem. Soc., 22, 46-52; Bettinger et al., 1999, Bioconjugate Chem., 10, 558-561; Peterson et al., 2002, Bioconjugate Chem., 13, 845-854; Erbacher et al., 1999, Journal of Gene Medicine Preprint, 1, 1-18; Godbey et al., 1999., PNAS USA, 96, 5177-5181; Godbey et al., 1999, Journal of Controlled Release, 60, 149-160; Diebold et al., 1999, Journal of Biological Chemistry, 274, 19087-19094; Thomas and Klibanov, 2002, PNAS USA, 99, 14640-14645; and Sagara, U.S. Pat. No. 6,586,524, incorporated by reference herein.

[0342] In one embodiment, a siNA molecule of the invention comprises a bioconjugate, for example a nucleic acid conjugate as described in Vargeese et al., U.S. Ser. No. 10/427,160, filed Apr. 30, 2003; U.S. Pat. No. 6,528,631; U.S. Pat. No. 6,335,434; U.S. Pat. No. 6,235,886; U.S. Pat. No. 6,153,737; U.S. Pat. No. 5,214,136; U.S. Pat. No. 5,138,045, all incorporated by reference herein.

[0343] Thus, the invention features a pharmaceutical composition comprising one or more nucleic acid(s) of the invention in an acceptable carrier, such as a stabilizer, buffer, and the like. The polynucleotides of the invention can be administered (e.g., RNA, DNA or protein) and introduced to a subject by any standard means, with or without stabilizers, buffers, and the like, to form a pharmaceutical composition. When it is desired to use a liposome delivery mechanism, standard protocols for formation of liposomes can be followed. The compositions of the present invention can also be formulated and used as creams, gels, sprays, oils and other suitable compositions for topical, dermal, or transdermal administration as is known in the art.

[0344] The present invention also includes pharmaceutically acceptable formulations of the compounds described. These formulations include salts of the above compounds, e.g., acid addition salts, for example, salts of hydrochloric, hydrobromic, acetic acid, and benzene sulfonic acid.

[0345] A pharmacological composition or formulation refers to a composition or formulation in a form suitable for administration, e.g., systemic or local administration, into a cell or subject, including for example a human. Suitable forms, in part, depend upon the use or the route of entry, for example oral, transdermal, or by injection. Such forms should not prevent the composition or formulation from reaching a target cell (i.e., a cell to which the negatively charged nucleic acid is desirable for delivery). For example, pharmacological compositions injected into the blood stream should be soluble. Other factors are known in the art, and include considerations such as toxicity and forms that prevent the composition or formulation from exerting its effect.

[0346] In one embodiment, siNA molecules of the invention are administered to a subject by systemic administration in a pharmaceutically acceptable composition or formulation. By “systemic administration” is meant in vivo systemic absorption or accumulation of drugs in the blood stream followed by distribution throughout the entire body. Administration routes that lead to systemic absorption include, without limitation: intravenous, subcutaneous, intraperitoneal, inhalation, oral, intrapulmonary and intramuscular. Each of these administration routes exposes the siNA molecules of the invention to an accessible diseased tissue. The rate of entry of a drug into the circulation has been shown to be a function of molecular weight or size. The use of a liposome or other drug carrier comprising the compounds of the instant invention can potentially localize the drug, for example, in certain tissue types, such as the tissues of the reticular endothelial system (RES). A liposome formulation that can facilitate the association of drug with the surface of cells, such as, lymphocytes and macrophages is also useful. This approach can provide enhanced delivery of the drug to target cells by taking advantage of the specificity of macrophage and lymphocyte immune recognition of abnormal cells.

[0347] By “pharmaceutically acceptable formulation” or “pharmaceutically acceptable composition” is meant, a composition or formulation that allows for the effective distribution of the nucleic acid molecules of the instant invention in the physical location most suitable for their desired activity. Non-limiting examples of agents suitable for formulation with the nucleic acid molecules of the instant invention include: P-glycoprotein inhibitors (such as Pluronic P85), biodegradable polymers, such as poly (DL-lactide-coglycolide) microspheres for sustained release delivery (Emerich, D F et al, 1999, Cell Transplant, 8, 47-58); and loaded nanoparticles, such as those made of polybutylcyanoacrylate. Other non-limiting examples of delivery strategies for the nucleic acid molecules of the instant invention include material described in Boado et al., 1998, J. Pharm. Sci., 87, 1308-1315; Tyler et al., 1999, FEBS Lett., 421, 280-284; Pardridge et al., 1995, PNAS USA., 92, 5592-5596; Boado, 1995, Adv. Drug Delivery Rev., 15, 73-107; Aldrian-Herrada et al., 1998, Nucleic Acids Res., 26, 49104916; and Tyler et al., 1999, PNAS USA., 96, 7053-7058.

[0348] The invention also features the use of the composition comprising surface-modified liposomes containing poly (ethylene glycol) lipids (PEG-modified, or long-circulating liposomes or stealth liposomes). These formulations offer a method for increasing the accumulation of drugs in target tissues. This class of drug carriers resists opsonization and elimination by the mononuclear phagocytic system (MPS or RES), thereby enabling longer blood circulation times and enhanced tissue exposure for the encapsulated drug (Lasic et al. Chem. Rev. 1995, 95, 2601-2627; Ishiwata et al., Chem. Pharm. Bull. 1995, 43, 1005-1011). Such liposomes have been shown to accumulate selectively in tumors, presumably by extravasation and capture in the neovascularized target tissues (Lasic et al., Science 1995, 267, 1275-1276; Oku et al., 1995, Biochim. Biophys. Acta, 1238, 86-90). The long-circulating liposomes enhance the pharmacokinetics and pharmacodynamics of DNA and RNA, particularly compared to conventional cationic liposomes which are known to accumulate in tissues of the MPS (Liu et al., J. Biol. Chem. 1995, 42, 24864-24870; Choi et al., International PCT Publication No. WO 96/10391; Ansell et al., International PCT Publication No. WO 96/10390; Holland et al., International PCT Publication No. WO 96/10392). Long-circulating liposomes are also likely to protect drugs from nuclease degradation to a greater extent compared to cationic liposomes, based on their ability to avoid accumulation in metabolically aggressive MPS tissues such as the liver and spleen.

[0349] The present invention also includes compositions prepared for storage or administration that include a pharmaceutically effective amount of the desired compounds in a pharmaceutically acceptable carrier or diluent. Acceptable carriers or diluents for therapeutic use are well known in the pharmaceutical art, and are described, for example, in Remington's Pharmaceutical Sciences, Mack Publishing Co. (A. R. Gennaro edit. 1985), hereby incorporated by reference herein. For example, preservatives, stabilizers, dyes and flavoring agents can be provided. These include sodium benzoate, sorbic acid and esters of p-hydroxybenzoic acid. In addition, antioxidants and suspending agents can be used.

[0350] A pharmaceutically effective dose is that dose required to prevent, inhibit the occurrence, or treat (alleviate a symptom to some extent, preferably all of the symptoms) of a disease state. The pharmaceutically effective dose depends on the type of disease, the composition used, the route of administration, the type of mammal being treated, the physical characteristics of the specific mammal under consideration, concurrent medication, and other factors that those skilled in the medical arts will recognize. Generally, an amount between 0.1 mg/kg and 100 mg/kg body weight/day of active ingredients is administered dependent upon potency of the negatively charged polymer.

[0351] The nucleic acid molecules of the invention and formulations thereof can be administered orally, topically, parenterally, by inhalation or spray, or rectally in dosage unit formulations containing conventional non-toxic pharmaceutically acceptable carriers, adjuvants and/or vehicles. The term parenteral as used herein includes percutaneous, subcutaneous, intravascular (e.g., intravenous), intramuscular, or intrathecal injection or infusion techniques and the like. In addition, there is provided a pharmaceutical formulation comprising a nucleic acid molecule of the invention and a pharmaceutically acceptable carrier. One or more nucleic acid molecules of the invention can be present in association with one or more non-toxic pharmaceutically acceptable carriers and/or diluents and/or adjuvants, and if desired other active ingredients. The pharmaceutical compositions containing nucleic acid molecules of the invention can be in a form suitable for oral use, for example, as tablets, troches, lozenges, aqueous or oily suspensions, dispersible powders or granules, emulsion, hard or soft capsules, or syrups or elixirs.

[0352] Compositions intended for oral use can be prepared according to any method known to the art for the manufacture of pharmaceutical compositions and such compositions can contain one or more such sweetening agents, flavoring agents, coloring agents or preservative agents in order to provide pharmaceutically elegant and palatable preparations. Tablets contain the active ingredient in admixture with non-toxic pharmaceutically acceptable excipients that are suitable for the manufacture of tablets. These excipients can be, for example, inert diluents; such as calcium carbonate, sodium carbonate, lactose, calcium phosphate or sodium phosphate; granulating and disintegrating agents, for example, corn starch, or alginic acid; binding agents, for example starch, gelatin or acacia; and lubricating agents, for example magnesium stearate, stearic acid or talc. The tablets can be uncoated or they can be coated by known techniques. In some cases such coatings can be prepared by known techniques to delay disintegration and absorption in the gastrointestinal tract and thereby provide a sustained action over a longer period. For example, a time delay material such as glyceryl monosterate or glyceryl distearate can be employed.

[0353] Formulations for oral use can also be presented as hard gelatin capsules wherein the active ingredient is mixed with an inert solid diluent, for example, calcium carbonate, calcium phosphate or kaolin, or as soft gelatin capsules wherein the active ingredient is mixed with water or an oil medium, for example peanut oil, liquid paraffin or olive oil.

[0354] Aqueous suspensions contain the active materials in a mixture with excipients suitable for the manufacture of aqueous suspensions. Such excipients are suspending agents, for example sodium carboxymethylcellulose, methylcellulose, hydropropyl-methylcellulose, sodium alginate, polyvinylpyrrolidone, gum tragacanth and gum acacia; dispersing or wetting agents can be a naturally-occurring phosphatide, for example, lecithin, or condensation products of an alkylene oxide with fatty acids, for example polyoxyethylene stearate, or condensation products of ethylene oxide with long chain aliphatic alcohols, for example heptadecaethyleneoxycetanol, or condensation products of ethylene oxide with partial esters derived from fatty acids and a hexitol such as polyoxyethylene sorbitol monooleate, or condensation products of ethylene oxide with partial esters derived from fatty acids and hexitol anhydrides, for example polyethylene sorbitan monooleate. The aqueous suspensions can also contain one or more preservatives, for example ethyl, or n-propyl p-hydroxybenzoate, one or more coloring agents, one or more flavoring agents, and one or more sweetening agents, such as sucrose or saccharin.

[0355] Oily suspensions can be formulated by suspending the active ingredients in a vegetable oil, for example arachis oil, olive oil, sesame oil or coconut oil, or in a mineral oil such as liquid paraffin. The oily suspensions can contain a thickening agent, for example beeswax, hard paraffin or cetyl alcohol. Sweetening agents and flavoring agents can be added to provide palatable oral preparations. These compositions can be preserved by the addition of an anti-oxidant such as ascorbic acid.

[0356] Dispersible powders and granules suitable for preparation of an aqueous suspension by the addition of water provide the active ingredient in admixture with a dispersing or wetting agent, suspending agent and one or more preservatives. Suitable dispersing or wetting agents or suspending agents are exemplified by those already mentioned above. Additional excipients, for example sweetening, flavoring and coloring agents, can also be present.

[0357] Pharmaceutical compositions of the invention can also be in the form of oil-in-water emulsions. The oily phase can be a vegetable oil or a mineral oil or mixtures of these. Suitable emulsifying agents can be naturally-occurring gums, for example gum acacia or gum tragacanth, naturally-occurring phosphatides, for example soy bean, lecithin, and esters or partial esters derived from fatty acids and hexitol, anhydrides, for example sorbitan monooleate, and condensation products of the said partial esters with ethylene oxide, for example polyoxyethylene sorbitan monooleate. The emulsions can also contain sweetening and flavoring agents.

[0358] Syrups and elixirs can be formulated with sweetening agents, for example glycerol, propylene glycol, sorbitol, glucose or sucrose. Such formulations can also contain a demulcent, a preservative and flavoring and coloring agents. The pharmaceutical compositions can be in the form of a sterile injectable aqueous or oleaginous suspension. This suspension can be formulated according to the known art using those suitable dispersing or wetting agents and suspending agents that have been mentioned above. The sterile injectable preparation can also be a sterile injectable solution or suspension in a non-toxic parentally acceptable diluent or solvent, for example as a solution in 1,3-butanediol. Among the acceptable vehicles and solvents that can be employed are water, Ringer's solution and isotonic sodium chloride solution. In addition, sterile, fixed oils are conventionally employed as a solvent or suspending medium. For this purpose, any bland fixed oil can be employed including synthetic mono- or diglycerides. In addition, fatty acids such as oleic acid find use in the preparation of injectables.

[0359] The nucleic acid molecules of the invention can also be administered in the form of suppositories, e.g., for rectal administration of the drug. These compositions can be prepared by mixing the drug with a suitable non-irritating excipient that is solid at ordinary temperatures but liquid at the rectal temperature and will therefore melt in the rectum to release the drug. Such materials include cocoa butter and polyethylene glycols.

[0360] Nucleic acid molecules of the invention can be administered parenterally in a sterile medium. The drug, depending on the vehicle and concentration used, can either be suspended or dissolved in the vehicle. Advantageously, adjuvants such as local anesthetics, preservatives and buffering agents can be dissolved in the vehicle.

[0361] Dosage levels of the order of from about 0.1 mg to about 140 mg per kilogram of body weight per day are useful in the treatment of the above-indicated conditions (about 0.5 mg to about 7 g per subject per day). The amount of active ingredient that can be combined with the carrier materials to produce a single dosage form varies depending upon the host treated and the particular mode of administration. Dosage unit forms generally contain between from about 1 mg to about 500 mg of an active ingredient.

[0362] It is understood that the specific dose level for any particular subject depends upon a variety of factors including the activity of the specific compound employed, the age, body weight, general health, sex, diet, time of administration, route of administration, and rate of excretion, drug combination and the severity of the particular disease undergoing therapy.

[0363] For administration to non-human animals, the composition can also be added to the animal feed or drinking water. It can be convenient to formulate the animal feed and drinking water compositions so that the animal takes in a therapeutically appropriate quantity of the composition along with its diet. It can also be convenient to present the composition as a premix for addition to the feed or drinking water.

[0364] The nucleic acid molecules of the present invention can also be administered to a subject in combination with other therapeutic compounds to increase the overall therapeutic effect. The use of multiple compounds to treat an indication can increase the beneficial effects while reducing the presence of side effects.

[0365] In one embodiment, the invention comprises compositions suitable for administering nucleic acid molecules of the invention to specific cell types. For example, the asialoglycoprotein receptor (ASGPr) (Wu and Wu, 1987, J. Biol. Chem. 262, 4429-4432) is unique to hepatocytes and binds branched galactose-terminal glycoproteins, such as asialoorosomucoid (ASOR). In another example, the folate receptor is overexpressed in many cancer cells. Binding of such glycoproteins, synthetic glycoconjugates, or folates to the receptor takes place with an affinity that strongly depends on the degree of branching of the oligosaccharide chain, for example, triatennary structures are bound with greater affinity than biatenarry or monoatennary chains (Baenziger and Fiete, 1980, Cell, 22, 611-620; Connolly et al., 1982, J. Biol. Chem., 257, 939-945). Lee and Lee, 1987, Glycoconjugate J., 4, 317-328, obtained this high specificity through the use of N-acetyl-D-galactosamine as the carbohydrate moiety, which has higher affinity for the receptor, compared to galactose. This “clustering effect” has also been described for the binding and uptake of mannosyl-terminating glycoproteins or glycoconjugates (Ponpipom et al., 1981, J. Med. Chem., 24, 1388-1395). The use of galactose, galactosamine, or folate based conjugates to transport exogenous compounds across cell membranes can provide a targeted delivery approach to, for example, the treatment of liver disease, cancers of the liver, or other cancers. The use of bioconjugates can also provide a reduction in the required dose of therapeutic compounds required for treatment. Furthermore, therapeutic bioavailability, pharmacodynamics, and pharmacokinetic parameters can be modulated through the use of nucleic acid bioconjugates of the invention. Non-limiting examples of such bioconjugates are described in Vargeese et al., U.S. Ser. No. 10/201,394, filed Aug. 13, 2001; and Matulic-Adamic et al., U.S. Ser. No. 60/362,016, filed Mar. 6, 2002.

[0366] Alternatively, certain siNA molecules of the instant invention can be expressed within cells from eukaryotic promoters (e.g., Izant and Weintraub, 1985, Science, 229, 345; McGarry and Lindquist, 1986, Proc. Natl. Acad. Sci., USA 83, 399; Scanlon et al., 1991, Proc. Natl. Acad. Sci. USA, 88, 10591-5; Kashani-Sabet et al., 1992, Antisense Res. Dev., 2, 3-15; Dropulic et al., 1992, J. Virol., 66, 1432-41; Weerasinghe et al., 1991, J. Virol., 65, 55314; Ojwang et al., 1992, Proc. Natl. Acad. Sci. USA, 89, 10802-6; Chen et al., 1992, Nucleic Acids Res., 20, 4581-9; Sarver et al., 1990 Science, 247, 1222-1225; Thompson et al., 1995, Nucleic Acids Res., 23, 2259; Good et al., 1997, Gene Therapy, 4, 45. Those skilled in the art realize that any nucleic acid can be expressed in eukaryotic cells from the appropriate DNA/RNA vector. The activity of such nucleic acids can be augmented by their release from the primary transcript by a enzymatic nucleic acid (Draper et al., PCT WO 93/23569, and Sullivan et al., PCT WO 94/02595; Ohkawa et al., 1992, Nucleic Acids Symp. Ser., 27, 15-6; Taira et al., 1991, Nucleic Acids Res., 19, 5125-30; Ventura et al., 1993, Nucleic Acids Res., 21, 3249-55; Chowrira et al., 1994, J. Biol. Chem., 269, 25856.

[0367] In another aspect of the invention, RNA molecules of the present invention can be expressed from transcription units (see for example Couture et al., 1996, TIG., 12, 510) inserted into DNA or RNA vectors. The recombinant vectors can be DNA plasmids or viral vectors. siNA expressing viral vectors can be constructed based on, but not limited to, adeno-associated virus, retrovirus, adenovirus, or alphavirus. In another embodiment, pol III based constructs are used to express nucleic acid molecules of the invention (see for example Thompson, U.S. Pats. Nos. 5,902,880 and 6,146,886). The recombinant vectors capable of expressing the siNA molecules can be delivered as described above, and persist in target cells. Alternatively, viral vectors can be used that provide for transient expression of nucleic acid molecules. Such vectors can be repeatedly administered as necessary. Once expressed, the siNA molecule interacts with the target mRNA and generates an RNAi response. Delivery of siNA molecule expressing vectors can be systemic, such as by intravenous or intra-muscular administration, by administration to target cells ex-planted from a subject followed by reintroduction into the subject, or by any other means that would allow for introduction into the desired target cell (for a review see Couture et al., 1996, TIG., 12, 510).

[0368] In one aspect the invention features an expression vector comprising a nucleic acid sequence encoding at least one siNA molecule of the instant invention. The expression vector can encode one or both strands of a siNA duplex, or a single self-complementary strand that self hybridizes into a siNA duplex. The nucleic acid sequences encoding the siNA molecules of the instant invention can be operably linked in a manner that allows expression of the siNA molecule (see for example Paul et al., 2002, Nature Biotechnology, 19, 505; Miyagishi and Taira, 2002, Nature Biotechnology, 19, 497; Lee et al., 2002, Nature Biotechnology, 19, 500; and Novina et al., 2002, Nature Medicine, advance online publication doi:10.1038/nm725).

[0369] In another aspect, the invention features an expression vector comprising: a) a transcription initiation region (e.g., eukaryotic pol I, II or III initiation region); b) a transcription termination region (e.g., eukaryotic pol I, II or III termination region); and c) a nucleic acid sequence encoding at least one of the siNA molecules of the instant invention, wherein said sequence is operably linked to said initiation region and said termination region in a manner that allows expression and/or delivery of the siNA molecule. The vector can optionally include an open reading frame (ORF) for a protein operably linked on the 5′ side or the 3′-side of the sequence encoding the siNA of the invention; and/or an intron (intervening sequences).

[0370] Transcription of the siNA molecule sequences can be driven from a promoter for eukaryotic RNA polymerase I (pol I), RNA polymerase II (pol II), or RNA polymerase III (pol III). Transcripts from pol II or pol III promoters are expressed at high levels in all cells; the levels of a given pol II promoter in a given cell type depends on the nature of the gene regulatory sequences (enhancers, silencers, etc.) present nearby. Prokaryotic RNA polymerase promoters are also used, providing that the prokaryotic RNA polymerase enzyme is expressed in the appropriate cells (Elroy-Stein and Moss, 1990, Proc. Natl. Acad. Sci. USA, 87, 6743-7; Gao and Huang 1993, Nucleic Acids Res., 21, 2867-72; Lieber et al., 1993, Methods Enzymol., 217, 47-66; Zhou et al., 1990, Mol. Cell. Biol., 10, 4529-37). Several investigators have demonstrated that nucleic acid molecules expressed from such promoters can function in mammalian cells (e.g. Kashani-Sabet et al., 1992, Antisense Res. Dev., 2, 3-15; Ojwang et al., 1992, Proc. Natl. Acad. Sci. USA, 89, 10802-6; Chen et al., 1992, Nucleic Acids Res., 20, 4581-9; Yu et al., 1993, Proc. Natl. Acad. Sci. USA, 90, 6340-4; L'Huillier et al., 1992, EMBO J, 11, 4411-8; Lisziewicz et al., 1993, Proc. Natl. Acad. Sci. U.S. A, 90, 8000-4; Thompson et al., 1995, Nucleic Acids Res., 23, 2259; Sullenger & Cech, 1993, Science, 262, 1566). More specifically, transcription units such as the ones derived from genes encoding U6 small nuclear (snRNA), transfer RNA (tRNA) and adenovirus VA RNA are useful in generating high concentrations of desired RNA molecules such as siNA in cells (Thompson et al., supra; Couture and Stinchcomb, 1996, supra; Noonberg et al., 1994, Nucleic Acid Res., 22, 2830; Noonberg et al., U.S. Pat. No. 5,624,803; Good et al., 1997, Gene Ther., 4, 45; Beigelman et al., International PCT Publication No. WO 96/18736. The above siNA transcription units can be incorporated into a variety of vectors for introduction into mammalian cells, including but not restricted to, plasmid DNA vectors, viral DNA vectors (such as adenovirus or adeno-associated virus vectors), or viral RNA vectors (such as retroviral or alphavirus vectors) (for a review see Couture and Stinchcomb, 1996, supra).

[0371] In another aspect the invention features an expression vector comprising a nucleic acid sequence encoding at least one of the siNA molecules of the invention in a manner that allows expression of that siNA molecule. The expression vector comprises in one embodiment; a) a transcription initiation region; b) a transcription termination region; and c) a nucleic acid sequence encoding at least one strand of the siNA molecule, wherein the sequence is operably linked to the initiation region and the termination region in a manner that allows expression and/or delivery of the siNA molecule.

[0372] In another embodiment the expression vector comprises: a) a transcription initiation region; b) a transcription termination region; c) an open reading frame; and d) a nucleic acid sequence encoding at least one strand of a siNA molecule, wherein the sequence is operably linked to the 3′-end of the open reading frame and wherein the sequence is operably linked to the initiation region, the open reading frame and the termination region in a manner that allows expression and/or delivery of the siNA molecule. In yet another embodiment, the expression vector comprises: a) a transcription initiation region; b) a transcription termination region; c) an intron; and d) a nucleic acid sequence encoding at least one siNA molecule, wherein the sequence is operably linked to the initiation region, the intron and the termination region in a manner which allows expression and/or delivery of the nucleic acid molecule.

[0373] In another embodiment, the expression vector comprises: a) a transcription initiation region; b) a transcription termination region; c) an intron; d) an open reading frame; and e) a nucleic acid sequence encoding at least one strand of a siNA molecule, wherein the sequence is operably linked to the 3′-end of the open reading frame and wherein the sequence is operably linked to the initiation region, the intron, the open reading frame and the termination region in a manner which allows expression and/or delivery of the siNA molecule.

Interleukin Biology and Biochemistry

[0374] The following discussion is adapted from R&D Systems Mini-Reveiws and Tech Notes, Cytokine Mini-Reviews, Copyright© 2002 R&D Systems. Interleukin 2 (IL-2) is a lymphokine synthesized and secreted primarily by T helper lymphocytes that have been activated by stimulation with certain mitogens or by interaction of the T cell receptor complex with antigen/MHC complexes on the surfaces of antigen-presenting cells. The response of T helper cells to activation is induction of the expression of IL-2 and receptors for IL-2 and, subsequently, clonal expansion of antigen-specific T cells. At this level IL-2 is an autocrine factor, driving the expansion of the antigen-specific cells. IL-2 also acts as a paracrine factor, influencing the activity of other cells, both within the immune system and outside of it. B cells and natural killer (NK) cells respond, when properly activated, to IL-2. The so-called lymphocyte activated killer, or LAK cells, appear to be derived from NK cells under the influence of IL-2.

[0375] The biological activities of IL-2 are mediated through the binding of IL-2 to a multisubunit cellular receptor. Although three distinct transmembrane glycoprotein subunits contribute to the formation of the high affinity IL-2 receptor, various combinations of receptor subunits (alpha, beta, gamma) are known to occur.

[0376] Interleukin 1 (IL-1) is a general name for two distinct proteins, IL-1a and IL-1b, that are considered the first of a family of regulatory and inflammatory cytokines. Along with IL-1 receptor antagonist (IL-1ra)2 and IL-18,3 these molecules play important roles in the up- and down-regulation of acute inflammation. In the immune system, the production of IL-1 is typically induced, generally resulting in inflammation. IL-1b and TNF-a are generally thought of as prototypical pro-inflammatory cytokines. The effects of IL-1, however, are not limited to inflammation, as IL-1 has also been associated with bone formation and remodeling, insulin secretion, appetite regulation, fever induction, neuronal phenotype development, and IGF/GH physiology. IL-1 has also been known by a number of alternative names, including lymphocyte activating factor, endogenous pyrogen, catabolin, hemopoietin-1, melanoma growth inhibition factor, and osteoclast activating factor. IL-1a and IL-1b exert their effects by binding to specific receptors. Two distinct IL-1 receptor binding proteins, plus a non-binding signaling accessory protein have been identified to date. Each have three extracellular immunoglobulin-like (Ig-like) domains, qualifying them for membership in the type IV cytokine receptor family.

[0377] Interleukin-4 (IL-4) mediates important pro-inflammatory functions in asthma including induction of the IgE isotype switch, expression of vascular cell adhesion molecule-1 (VCAM-1), promotion of eosinophil transmigration across endothelium, mucus secretion, and differentiation of T helper type 2 lymphocytes leading to cytokine release. Asthma has been linked to polymorphisms in the IL-4 gene promoter and proteins involved in IL-4 signaling. Soluble recombinant IL-4 receptor lacks transmembrane and cytoplasmic activating domains and can therefore sequester IL-4 without mediating cellular activation. Genetic variants within the IL-4 signalling pathway might contribute to the risk of developing asthma in a given individual. A number of polymorphisms have been described within the IL-4 receptor α (IL-4Rα) gene, and in addition, polymorphism occurs in the promoter for the IL-4 gene itself (see for example Hall, 2000, Respir. Res., 1, 6-8 and Ober et al., 2000, Am J Hum Genet., 66, 517-526, for a review). The type 2 cytokine IL-13, which shares a receptor component and signaling pathways with IL-4, was found to be necessary and sufficient for the expression of allergic asthma (see Wills-Karp et al., 1998, Science, 282, 2258-61). IL-13 induces the pathophysiological features of asthma in a manner that is independent of immunoglobulin E and eosinophils. Thus, IL-13 is critical to allergen-induced asthma but operates through mechanisms other than those that are classically implicated in allergic responses.

[0378] Human IL-5 is a 134 amino acid polypeptide with a predicted mass of 12.5 kDa. It is secreted by a restricted number of mesenchymal cell types. In its native state, mature IL-5 is synthesized as a 115 aa, highly glycosylated 22 kDa monomer that forms a 40-50 kDa disulfide-linked homodimer. Although the content of carbohydrate is high, carbohydrate is not needed for bioactivity. Monomeric IL-5 has no activity; a homodimer is required for function. This is in contrast to the receptor-related cytokines IL-3 and GM-CSF, which exist only as monomers. Just as one IL-3 and GM-CSF monomer binds to one receptor, one IL-5 homodimer is able to engage only one IL-5 receptor. It has been suggested that IL-5 (as a dimer) undergoes a general conformational change after binding to one receptor molecule, and this change precludes binding to a second receptor. The receptor for IL-5 consists of a ligand binding a-subunit and a non-ligand binding (common) signal transducing b-subunit that is shared by the receptors for IL-3 and GM-CSF. IL-5 appears to perform a number of functions on eosinophils. These include the down modulation of Mac-1, the upregulation of receptors for IgA and IgG, the stimulation of lipid mediator (leukotriene C4 and PAF) secretion and the induction of granule release. IL-5 also promotes the growth and differentiation of eosinophils.

[0379] Interleukin 6 (IL-6) is considered a prototypic pleiotrophic cytokine. This is reflected in the variety of names originally assigned to IL-6 based on function, including Interferon b2, IL-1-inducible 26 kD Protein, Hepatocyte Stimulating Factor, Cytotoxic T-cell Differentiation Factor, B cell Differentiation Factor (BCDF) and/or B cell Stimulatory Factor 2 (BSF2). A number of cytokines make up an IL-6 cytokine family. Membership in this family is typically based on a helical cytokine structure and receptor subunit makeup. The functional receptor for IL-6 is a complex of two transmembrane glycoproteins (gp130 and IL-6 receptor) that are members of the Class I cytokine receptor superfamily.

[0380] Because of the central role of the interleukin family of cytokines in the mediation of immune and inflammatory responses, modulation of interleukin expression and/or activity can provide important functions in therpeutic and diagnostic applications. The use of small interfering nucleic acid molecules targeting interleukins and their corresponding receptors therefore provides a class of novel therapeutic agents that can be used in the treatment of cancers, proliferative diseases, inflammatory disease, respiratory disease, pulmonary disease, cardiovascular disease, autoimmune disease, infectious disease, prior disease, renal disease, transplant rejection, or any other disease or condition that responds to modulation of interleukin and interleukin receptor genes.

### EXAMPLES

[0381] The following are non-limiting examples showing the selection, isolation, synthesis and activity of nucleic acids of the instant invention.

### Example 1

### Tandem Synthesis of siNA Constructs

[0382] Exemplary siNA molecules of the invention are synthesized in tandem using a cleavable linker, for example, a succinyl-based linker. Tandem synthesis as described herein is followed by a one-step purification process that provides RNAi molecules in high yield. This approach is highly amenable to siNA synthesis in support of high throughput RNAi screening, and can be readily adapted to multi-column or multi-well synthesis platforms.

[0383] After completing a tandem synthesis of a siNA oligo and its complement in which the 5′-terminal dimethoxytrityl (5′-O-DMT) group remains intact (trityl on synthesis), the oligonucleotides are deprotected as described above. Following deprotection, the siNA sequence strands are allowed to spontaneously hybridize. This hybridization yields a duplex in which one strand has retained the 5′-O-DMT group while the complementary strand comprises a terminal 5′-hydroxyl. The newly formed duplex behaves as a single molecule during routine solid-phase extraction purification (Trityl-On purification) even though only one molecule has a dimethoxytrityl group. Because the strands form a stable duplex, this dimethoxytrityl group (or an equivalent group, such as other trityl groups or other hydrophobic moieties) is all that is required to purify the pair of oligos, for example, by using a C18 cartridge.

[0384] Standard phosphoramidite synthesis chemistry is used up to the point of introducing a tandem linker, such as an inverted deoxy abasic succinate or glyceryl succinate linker (see FIG. 1) or an equivalent cleavable linker. A non-limiting example of linker coupling conditions that can be used includes a hindered base such as diisopropylethylamine (DIPA) and/or DMAP in the presence of an activator reagent such as Bromotripyrrolidinophosphoniumhexaflurorophosphate (PyBrOP). After the linker is coupled, standard synthesis chemistry is utilized to complete synthesis of the second sequence leaving the terminal the 5′-O-DMT intact. Following synthesis, the resulting oligonucleotide is deprotected according to the procedures described herein and quenched with a suitable buffer, for example with 50 mM NaOAc or 1.5M NH₄H₂CO₃.

[0385] Purification of the siNA duplex can be readily accomplished using solid phase extraction, for example, using a Waters C18 SepPak 1 g cartridge conditioned with 1 column volume (CV) of acetonitrile, 2 CV H2O, and 2 CV 50 mM NaOAc. The sample is loaded and then washed with I CV H2O or 50 mM NaOAc. Failure sequences are eluted with 1 CV 14% ACN (Aqueous with 50 mM NaOAc and 50 mM NaCl). The column is then washed, for example with 1 CV H2O followed by on-column detritylation, for example by passing 1 CV of 1% aqueous trifluoroacetic acid (TFA) over the column, then adding a second CV of 1% aqueous TFA to the column and allowing to stand for approximately 10 minutes. The remaining TFA solution is removed and the column washed with H20 followed by 1 CV 1M NaCl and additional H2O. The siNA duplex product is then eluted, for example, using 1 CV 20% aqueous CAN.

[0386] FIG. 2 provides an example of MALDI-TOF mass spectrometry analysis of a purified siNA construct in which each peak corresponds to the calculated mass of an individual siNA strand of the siNA duplex. The same purified siNA provides three peaks when analyzed by capillary gel electrophoresis (CGE), one peak presumably corresponding to the duplex siNA, and two peaks presumably corresponding to the separate siNA sequence strands. Ion exchange HPLC analysis of the same siNA contract only shows a single peak. Testing of the purified siNA construct using a luciferase reporter assay described below demonstrated the same RNAi activity compared to siNA constructs generated from separately synthesized oligonucleotide sequence strands.

### Example 2

### Identification of Potential siNA Target Sites in any RNA Sequence

[0387] The sequence of an RNA target of interest, such as a viral or human mRNA transcript, is screened for target sites, for example by using a computer folding algorithm. In a non-limiting example, the sequence of a gene or RNA gene transcript derived from a database, such as Genbank, is used to generate siNA targets having complementarity to the target. Such sequences can be obtained from a database, or can be determined experimentally as known in the art. Target sites that are known, for example, those target sites determined to be effective target sites based on studies with other nucleic acid molecules, for example ribozymes or antisense, or those targets known to be associated with a disease or condition such as those sites containing mutations or deletions, can be used to design siNA molecules targeting those sites. Various parameters can be used to determine which sites are the most suitable target sites within the target RNA sequence. These parameters include but are not limited to secondary or tertiary RNA structure, the nucleotide base composition of the target sequence, the degree of homology between various regions of the target sequence, or the relative position of the target sequence within the RNA transcript. Based on these determinations, any number of target sites within the RNA transcript can be chosen to screen siNA molecules for efficacy, for example by using in vitro RNA cleavage assays, cell culture, or animal models. In a non-limiting example, anywhere from 1 to 1000 target sites are chosen within the transcript based on the size of the siNA construct to be used. High throughput screening assays can be developed for screening siNA molecules using methods known in the art, such as with multi-well or multi-plate assays to determine efficient reduction in target gene expression.

### Example 3

### Selection of siNA Molecule Target Sites in a RNA

[0388] The following non-limiting steps can be used to carry out the selection of siNAs targeting a given gene sequence or transcript.
[0389] 1. The target sequence is parsed in silico into a list of all fragments or subsequences of a particular length, for example 23 nucleotide fragments, contained within the target sequence. This step is typically carried out using a custom Perl script, but commercial sequence analysis programs such as Oligo, MacVector, or the GCG Wisconsin Package can be employed as well.
[0390] 2. In some instances the siNAs correspond to more than one target sequence; such would be the case for example in targeting different transcripts of the same gene, targeting different transcripts of more than one gene, or for targeting both the human gene and an animal homolog. In this case, a subsequence list of a particular length is generated for each of the targets, and then the lists are compared to find matching sequences in each list. The subsequences are then ranked according to the number of target sequences that contain the given subsequence; the goal is to find subsequences that are present in most or all of the target sequences. Alternately, the ranking can identify subsequences that are unique to a target sequence, such as a mutant target sequence. Such an approach would enable the use of siNA to target specifically the mutant sequence and not effect the expression of the normal sequence.
[0391] 3. In some instances the siNA subsequences are absent in one or more sequences while present in the desired target sequence; such would be the case if the siNA targets a gene with a paralogous family member that is to remain untargeted. As in case 2 above, a subsequence list of a particular length is generated for each of the targets, and then the lists are compared to find sequences that are present in the target gene but are absent in the untargeted paralog.
[0392] 4. The ranked siNA subsequences can be further analyzed and ranked according to GC content. A preference can be given to sites containing 30-70% GC, with a further preference to sites containing 40-60% GC.
[0393] 5. The ranked siNA subsequences can be further analyzed and ranked according to self-folding and internal hairpins. Weaker internal folds are preferred; strong hairpin structures are to be avoided.
[0394] 6. The ranked siNA subsequences can be further analyzed and ranked according to whether they have runs of GGG or CCC in the sequence. GGG (or even more Gs) in either strand can make oligonucleotide synthesis problematic and can potentially interfere with RNAi activity, so it is avoided whenever better sequences are available. CCC is searched in the target strand because that will place GGG in the antisense strand.
[0395] 7. The ranked siNA subsequences can be further analyzed and ranked according to whether they have the dinucleotide UU (uridine dinucleotide) on the 3′-end of the sequence, and/or AA on the 5′-end of the sequence (to yield 3′ UU on the antisense sequence). These sequences allow one to design siNA molecules with terminal TT thymidine dinucleotides.
[0396] 8. Four or five target sites are chosen from the ranked list of subsequences as described above. For example, in subsequences having 23 nucleotides, the right 21 nucleotides of each chosen 23-mer subsequence are then designed and synthesized for the upper (sense) strand of the siNA duplex, while the reverse complement of the left 21 nucleotides of each chosen 23-mer subsequence are then designed and synthesized for the lower (antisense) strand of the siNA duplex (see Tables II and III). If terminal TT residues are desired for the sequence (as described in paragraph 7), then the two 3′ terminal nucleotides of both the sense and antisense strands are replaced by TT prior to synthesizing the oligos.
[0397] 9. The siNA molecules are screened in an in vitro, cell culture or animal model system to identify the most active siNA molecule or the most preferred target site within the target RNA sequence.

[0398] 10. Other design considerations can be used when selecting target nucleic acid sequences, see, for example, Reynolds et al., 2004, Nature Biotechnology Advanced Online Publication, 1 Feb. 2004, doi:10.1038/nbt936 and Ui-Tei et al., 2004, Nucleic Acids Research, 32, doi: 10.1093/nar/gkh247.

[0399] In an alternate approach, a pool of siNA constructs specific to an interleukin and/or interleukin receptor target sequence is used to screen for target sites in cells expressing interleukin and/or interleukin receptor RNA, such as such cultured Jurkat, Hela, or 293T cells. The general strategy used in this approach is shown in FIG. 9. A non-limiting example of such is a pool comprising sequences having any of SEQ ID NOs: 1-1828. Cells expressing interleukin and/or interleukin receptor are transfected with the pool of siNA constructs and cells that demonstrate a phenotype associated with interleukin and/or interleukin receptor inhibition are sorted. The pool of siNA constructs can be expressed from transcription cassettes inserted into appropriate vectors (see for example FIG. 7 and FIG. 8). The siNA from cells demonstrating a positive phenotypic change (e.g., decreased proliferation, decreased interleukin and/or interleukin receptor mRNA levels or decreased interleukin and/or interleukin receptor protein expression), are sequenced to determine the most suitable target site(s) within the target interleukin and/or interleukin receptor RNA sequence.

### Example 4

### Interleukin and/or Interleukin Receptor Targeted siNA Design

[0400] siNA target sites were chosen by analyzing sequences of the interleukin and/or interleukin receptor RNA target and optionally prioritizing the target sites on the basis of folding (structure of any given sequence analyzed to determine siNA accessibility to the target), by using a library of siNA molecules as described in Example 3, or alternately by using an in vitro siNA system as described in Example 6 herein. siNA molecules were designed that could bind each target and are optionally individually analyzed by computer folding to assess whether the siNA molecule can interact with the target sequence. Varying the length of the siNA molecules can be chosen to optimize activity. Generally, a sufficient number of complementary nucleotide bases are chosen to bind to, or otherwise interact with, the target RNA, but the degree of complementarity can be modulated to accommodate siNA duplexes or varying length or base composition. By using such methodologies, siNA molecules can be designed to target sites within any known RNA sequence, for example those RNA sequences corresponding to the any gene transcript.

[0401] Chemically modified siNA constructs are designed to provide nuclease stability for systemic administration in vivo and/or improved pharmacokinetic, localization, and delivery properties while preserving the ability to mediate RNAi activity. Chemical modifications as described herein are introduced synthetically using synthetic methods described herein and those generally known in the art. The synthetic siNA constructs are then assayed for nuclease stability in serum and/or cellular/tissue extracts (e.g. liver extracts). The synthetic siNA constructs are also tested in parallel for RNAi activity using an appropriate assay, such as a luciferase reporter assay as described herein or another suitable assay that can quantity RNAi activity. Synthetic siNA constructs that possess both nuclease stability and RNAi activity can be further modified and re-evaluated in stability and activity assays. The chemical modifications of the stabilized active siNA constructs can then be applied to any siNA sequence targeting any chosen RNA and used, for example, in target screening assays to pick lead siNA compounds for therapeutic development (see for example FIG. 11).

### Example 5

### Chemical Synthesis and Purification of siNA

[0402] siNA molecules can be designed to interact with various sites in the RNA message, for example, target sequences within the RNA sequences described herein. The sequence of one strand of the siNA molecule(s) is complementary to the target site sequences described above. The siNA molecules can be chemically synthesized using methods described herein. Inactive siNA molecules that are used as control sequences can be synthesized by scrambling the sequence of the siNA molecules such that it is not complementary to the target sequence. Generally, siNA constructs can by synthesized using solid phase oligonucleotide synthesis methods as described herein (see for example Usman et al., U.S. Pat. Nos. 5,804,683; 5,831,071; 5,998,203; 6,117,657; 6,353,098; 6,362,323; 6,437,117; 6,469,158; Scaringe et al., U.S. Pat. Nos. 6,111,086; 6,008,400; 6,111,086 all incorporated by reference herein in their entirety).

[0403] In a non-limiting example, RNA oligonucleotides are synthesized in a stepwise fashion using the phosphoramidite chemistry as is known in the art. Standard phosphoramidite chemistry involves the use of nucleosides comprising any of 5′-O-dimethoxytrityl, 2′-O-tert-butyldimethylsilyl, 3′-O-2-Cyanoethyl N,N-diisopropylphos-phoroamidite groups, and exocyclic amine protecting groups (e.g. N6-benzoyl adenosine, N4 acetyl cytidine, and N2-isobutyryl guanosine). Alternately, 2′-O-Silyl Ethers can be used in conjunction with acid-labile 2′-O-orthoester protecting groups in the synthesis of RNA as described by Scaringe supra. Differing 2′ chemistries can require different protecting groups, for example 2′-deoxy-2′-amino nucleosides can utilize N-phthaloyl protection as described by Usman et al., U.S. Pat. No. 5,631,360, incorporated by reference herein in its entirety).

[0404] During solid phase synthesis, each nucleotide is added sequentially (3′- to 5′-direction) to the solid support-bound oligonucleotide. The first nucleoside at the 3′-end of the chain is covalently attached to a solid support (e.g., controlled pore glass or polystyrene) using various linkers. The nucleotide precursor, a ribonucleoside phosphoramidite, and activator are combined resulting in the coupling of the second nucleoside phosphoramidite onto the 5′-end of the first nucleoside. The support is then washed and any unreacted 5′-hydroxyl groups are capped with a capping reagent such as acetic anhydride to yield inactive 5′-acetyl moieties. The trivalent phosphorus linkage is then oxidized to a more stable phosphate linkage. At the end of the nucleotide addition cycle, the 5′-O-protecting group is cleaved under suitable conditions (e.g., acidic conditions for trityl-based groups and Fluoride for silyl-based groups). The cycle is repeated for each subsequent nucleotide.

[0405] Modification of synthesis conditions can be used to optimize coupling efficiency, for example by using differing coupling times, differing reagent/phosphoramidite concentrations, differing contact times, differing solid supports and solid support linker chemistries depending on the particular chemical composition of the siNA to be synthesized. Deprotection and purification of the siNA can be performed as is generally described in Usman et al., U.S. Pat. No. 5,831,071, U.S. Pat. No. 6,353,098, U.S. Pat. No. 6,437,117, and Bellon et al., U.S. Pat. No. 6,054,576, U.S. Pat. No. 6,162,909, U.S. Pat. No. 6,303,773, or Scaringe supra, incorporated by reference herein in their entireties. Additionally, deprotection conditions can be modified to provide the best possible yield and purity of siNA constructs. For example, applicant has observed that oligonucleotides comprising 2′-deoxy-2′-fluoro nucleotides can degrade under inappropriate deprotection conditions. Such oligonucleotides are deprotected using aqueous methylamine at about 35° C. for 30 minutes. If the 2′-deoxy-2′-fluoro containing oligonucleotide also comprises ribonucleotides, after deprotection with aqueous methylamine at about 35° C. for 30 minutes, TEA-HF is added and the reaction maintained at about 65° C. for an additional 15 minutes.

### Example 6

### RNAi In Vitro Assay to Assess siNA Activity

[0406] An in vitro assay that recapitulates RNAi in a cell-free system is used to evaluate siNA constructs targeting interleukin and/or interleukin receptor RNA targets. The assay comprises the system described by Tuschl et al., 1999, Genes and Development, 13, 3191-3197 and Zamore et al., 2000, Cell, 101, 25-33 adapted for use with interleukin and/or interleukin receptor target RNA. A Drosophila extract derived from syncytial blastoderm is used to reconstitute RNAi activity in vitro. Target RNA is generated via in vitro transcription from an appropriate interleukin and/or interleukin receptor expressing plasmid using T7 RNA polymerase or via chemical synthesis as described herein. Sense and antisense siNA strands (for example 20 uM each) are annealed by incubation in buffer (such as 100 mM potassium acetate, 30 mM HEPES-KOH, pH 7.4, 2 mM magnesium acetate) for 1 minute at 90° C. followed by 1 hour at 37° C., then diluted in lysis buffer (for example 100 mM potassium acetate, 30 mM HEPES-KOH at pH 7.4, 2 mM magnesium acetate). Annealing can be monitored by gel electrophoresis on an agarose gel in TBE buffer and stained with ethidium bromide. The Drosophila lysate is prepared using zero to two-hour-old embryos from Oregon R flies collected on yeasted molasses agar that are dechorionated and lysed. The lysate is centrifuged and the supernatant isolated. The assay comprises a reaction mixture containing 50% lysate [vol/vol], RNA (10-50 pM final concentration), and 10% [vol/vol] lysis buffer containing siNA (10 nM final concentration). The reaction mixture also contains 10 mM creatine phosphate, 10 ug/ml creatine phosphokinase, 100 um GTP, 100 uM UTP, 100 uM CTP, 500 uM ATP, 5 mM DTT, 0.1 U/uL RNasin (Promega), and 100 uM of each amino acid. The final concentration of potassium acetate is adjusted to 100 mM. The reactions are pre-assembled on ice and preincubated at 25° C. for 10 minutes before adding RNA, then incubated at 25° C. for an additional 60 minutes. Reactions are quenched with 4 volumes of 1.25× Passive Lysis Buffer (Promega). Target RNA cleavage is assayed by RT-PCR analysis or other methods known in the art and are compared to control reactions in which siNA is omitted from the reaction.

[0407] Alternately, internally-labeled target RNA for the assay is prepared by in vitro transcription in the presence of [alpha-³²P] CTP, passed over a G50 Sephadex column by spin chromatography and used as target RNA without further purification. Optionally, target RNA is 5′-³²P-end labeled using T4 polynucleotide kinase enzyme. Assays are performed as described above and target RNA and the specific RNA cleavage products generated by RNAi are visualized on an autoradiograph of a gel. The percentage of cleavage is determined by PHOSPHOR IMAGER® (autoradiography) quantitation of bands representing intact control RNA or RNA from control reactions without siNA and the cleavage products generated by the assay.

[0408] In one embodiment, this assay is used to determine target sites in the interleukin and/or interleukin receptor RNA target for siNA mediated RNAi cleavage, wherein a plurality of siNA constructs are screened for RNAi mediated cleavage of the interleukin and/or interleukin receptor RNA target, for example, by analyzing the assay reaction by electrophoresis of labeled target RNA, or by northern blotting, as well as by other methodology well known in the art.

### Example 7

### Nucleic Acid Inhibition of Interleukin and/or Interleukin Receptor Target RNA

[0409] siNA molecules targeted to the human interleukin and/or interleukin receptor RNA are designed and synthesized as described above. These nucleic acid molecules can be tested for cleavage activity in vivo, for example, using the following procedure. The target sequences and the nucleotide location within the interleukin and/or interleukin receptor RNA are given in Tables II and III.

[0410] Two formats are used to test the efficacy of siNAs targeting interleukin and/or interleukin receptor. First, the reagents are tested in cell culture using, for example, Jurkat, Hela, or 293T cells, to determine the extent of RNA and protein inhibition. siNA reagents (e.g.; see Tables II and III) are selected against the interleukin and/or interleukin receptor target as described herein. RNA inhibition is measured after delivery of these reagents by a suitable transfection agent to, for example, Jurkat, Hela, or 293T cells. Relative amounts of target RNA are measured versus actin using real-time PCR monitoring of amplification (eg., ABI 7700 TAQMAN®). A comparison is made to a mixture of oligonucleotide sequences made to unrelated targets or to a randomized siNA control with the same overall length and chemistry, but randomly substituted at each position. Primary and secondary lead reagents are chosen for the target and optimization performed. After an optimal transfection agent concentration is chosen, a RNA time-course of inhibition is performed with the lead siNA molecule. In addition, a cell-plating format can be used to determine RNA inhibition.

Delivery of siNA to Cells

[0411] Cells such as Jurkat, Hela, or 293T cells are seeded, for example, at 1×10⁵ cells per well of a six-well dish in EGM-2 (BioWhittaker) the day before transfection. siNA (final concentration, for example 20 nM) and cationic lipid (e.g., final concentration 2 μg/ml) are complexed in EGM basal media (Bio Whittaker) at 37° C. for 30 minutes in polystyrene tubes. Following vortexing, the complexed siNA is added to each well and incubated for the times indicated. For initial optimization experiments, cells are seeded, for example, at 1×10³ in 96 well plates and siNA complex added as described. Efficiency of delivery of siNA to cells is determined using a fluorescent siNA complexed with lipid. Cells in 6-well dishes are incubated with siNA for 24 hours, rinsed with PBS and fixed in 2% paraformaldehyde for 15 minutes at room temperature. Uptake of siNA is visualized using a fluorescent microscope.

TAOMAN® (Real-Time PCR Monitoring of Amplification) and Lightcycler Quantification of mRNA

[0412] Total RNA is prepared from cells following siNA delivery, for example, using Qiagen RNA purification kits for 6-well or Rneasy extraction kits for 96-well assays. For TAQMAN® analysis (real-time PCR monitoring of amplification), dual-labeled probes are synthesized with the reporter dye, FAM or JOE, covalently linked at the 5′-end and the quencher dye TAMRA conjugated to the 3′-end. One-step RT-PCR amplifications are performed on, for example, an ABI PRISM 7700 Sequence Detector using 50 μl reactions consisting of 10 μl total RNA, 100 nM forward primer, 900 nM reverse primer, 100 nM probe, 1× TaqMan PCR reaction buffer (PE-Applied Biosystems), 5.5 mM MgCl₂, 300 μM each dATP, dCTP, dGTP, and dTTP, 10U RNase Inhibitor (Promega), 1.25U AMPLITAQ GOLD® (DNA polymerase) (PE-Applied Biosystems) and 10U M-MLV Reverse Transcriptase (Promega). The thermal cycling conditions can consist of 30 minutes at 48° C., 10 minutes at 95° C., followed by 40 cycles of 15 seconds at 95° C. and 1 minute at 60° C. Quantitation of mRNA levels is determined relative to standards generated from serially diluted total cellular RNA (300, 100, 33, 11 ng/rxn) and normalizing to β-actin or GAPDH mRNA in parallel TAQMAN® reactions (real-time PCR monitoring of amplification). For each gene of interest an upper and lower primer and a fluorescently labeled probe are designed. Real time incorporation of SYBR Green I dye into a specific PCR product can be measured in glass capillary tubes using a lightcyler. A standard curve is generated for each primer pair using control cRNA. Values are represented as relative expression to GAPDH in each sample.

Western blotting

[0413] Nuclear extracts can be prepared using a standard micro preparation technique (see for example Andrews and Faller, 1991, Nucleic Acids Research, 19, 2499). Protein extracts from supernatants are prepared, for example using TCA precipitation. An equal volume of 20% TCA is added to the cell supernatant, incubated on ice for 1 hour and pelleted by centrifugation for 5 minutes. Pellets are washed in acetone, dried and resuspended in water. Cellular protein extracts are run on a 10% Bis-Tris NuPage (nuclear extracts) or 4-12% Tris-Glycine (supernatant extracts) polyacrylamide gel and transferred onto nitro-cellulose membranes. Non-specific binding can be blocked by incubation, for example, with 5% non-fat milk for 1 hour followed by primary antibody for 16 hour at 4° C. Following washes, the secondary antibody is applied, for example (1:10,000 dilution) for 1 hour at room temperature and the signal detected with SuperSignal reagent (Pierce).

### Example 8

### Animal Models Useful to Evaluate the Down-Regulation of Interleukin and/or Interleukin Receptor Gene Expression

[0414] Evaluating the efficacy of anti-interleukin agents in animal models is an important prerequisite to human clinical trials. Allogeneic rejection is the most common cause of corneal graft failure. King et al., 2000, Transplantation, 70, 1225-1233, describe a study investigating the kinetics of cytokine and chemokine mRNA expression before and after the onset of corneal graft rejection. Intracorneal cytokine and chemokine mRNA levels were investigated in the Brown Norway-Lewis inbred rat model, in which rejection onset is observed at 8/9 days after grafting in all animals. Nongrafted corneas and syngeneic (Lewis-Lewis) corneal transplants were used as controls. Donor and recipient cornea were examined by quantitive competitive reverse transcription-polymerase chain reaction (RT-PCR) for hypoxyanthine phosphoribosyltransferase (HPRT), CD3, CD25, interleukin (IL)-1beta, IL-1RA, IL-2, IL-6, IL-10, interferon-gamma (IFN-gamma), tumor necrosis factor (TNF), transforming growth factor (TGF)-beta1, and macrophage inflammatory protein (MIP)-2 and by RT-PCR for IL-4, IL-5, IL-12 p40, IL-13, TGF-beta.2, monocyte chemotactic protein-1 (MCP-1), MIP-1alpha, MIP-1beta, and RANTES. A biphasic expression of cytokine and chemokine mRNA was found after transplantation. During the early phase (days 3-9), there was an elevation of the majority of the cytokines examined, including IL-1beta, IL-6, IL-10, IL-12 p40, and MIP-2. There was no difference in cytokine expression patterns between allogeneic or syngeneic recipients at this time. In syngeneic recipients, cytokine levels reduced to pretransplant levels by day 13, whereas levels of all cytokines rose after the rejection onset in the allografts, including TGF-beta.1, TGF-beta.2, and IL-1RA. The T cell-derived cytokines IL-4, IL-13, and IFN-gamma were detected only during the rejection phase in allogeneic recipients. Thus, there appears to be an early cytokine and chemokine response to the transplantation process, evident in syngeneic and allogeneic grafts, that drives angiogenesis, leukocyte recruitment, and affects other leukocyte functions. After an immune response has been generated, allogeneic rejection results in the expression of Th1 cytokines, Th2 cytokines, and anti-inflammatory/Th3 cytokines. This animal model can be used to evaluate the efficacy of nucleic acid molecules of the invention targeting interleukin expression (e.g., phenotypic change, interleuking expression etc.) toward therapeutic use in treating transplant rejection. Similarly, other animal models of transplant rejection as are known in the art can be used to evaluate nucleic acid molecules (e.g., siNA) of the invention toward therapeutic use.

[0415] Other animal models are useful in evaluating the role of interleukins in asthma. For example, Kuperman et al., 2002, Nature Medicine, 8, 885-9, describe an animal model of IL-13 mediated asthma response animal models of allergic asthma in which blockade of IL-13 markedly inhibits allergen-induced asthma. Venkayya et al., 2002, Am J Respir Cell Mol. Biol., 26, 202-8 and Yang et al., 2001, Am J Respir Cell Mol. Biol., 25, 522-30 describe animal models of airway inflammation and airway hyperresponsiveness (AHR) in which IL-4/IL-4R and IL-13 mediate asthma. These models can be used to evaluate the efficacy of siNA molecules of the invention targeting, for example, IL-4, IL-4R, IL-13, and/or IL-13R for use is treating asthma.

### Example 9

### RNAi Mediated Inhibition of Interleukin and/or Interleukin Receptor Expression

[0416] siNA constructs (Table III) are tested for efficacy in reducing interleukin and/or interleukin receptor RNA expression in, for example, Jurkat, Hela, or 293T. Cells are plated approximately 24 hours before transfection in 96-well plates at 5,000-7,500 cells/well, 100 μl/well, such that at the time of transfection cells are 70-90% confluent. For transfection, annealed siNAs are mixed with the transfection reagent (Lipofectamine 2000, Invitrogen) in a volume of 50 μl/well and incubated for 20 minutes at room temperature. The siNA transfection mixtures are added to cells to give a final siNA concentration of 25 nM in a volume of 150 μl. Each siNA transfection mixture is added to 3 wells for triplicate siNA treatments. Cells are incubated at 37° for 24 hours in the continued presence of the siNA transfection mixture. At 24 hours, RNA is prepared from each well of treated cells. The supernatants with the transfection mixtures are first removed and discarded, then the cells are lysed and RNA prepared from each well. Target gene expression following treatment is evaluated by RT-PCR for the target gene and for a control gene (36B4, an RNA polymerase subunit) for normalization. The triplicate data is averaged and the standard deviations determined for each treatment. Normalized data are graphed and the percent reduction of target mRNA by active siNAs in comparison to their respective inverted control siNAs is determined.

[0417] In a non-limiting example, chemically modified siNA constructs (Table III) were tested for efficacy as described above in reducing IL-4R RNA expression in HeLa cells. Active siNAs were evaluated compared to matched chemistry irrelevant control (IC), and a transfection control. Results are summarized in FIG. 22. FIG. 22 shows results for chemically modified siNA constructs targeting various sites in IL-4R RNA. As shown in FIG. 22, the active siNA constructs provide significant inhibition of IL-4R gene expression in cell culture experiments as determined by levels of IL-4R mRNA when compared to appropriate controls.

[0418] In another non-limiting example, chemically modified siNA constructs (Table III) were tested for efficacy as described above in reducing IL-13R RNA expression in HeLa cells. Active siNAs were evaluated compared to untreated cells, matched chemistry irrelevant control (IC), and a transfection control. Results are summarized in FIG. 23. FIG. 23 shows results for chemically modified siNA constructs targeting various sites in IL-13R RNA. As shown in FIG. 23, the active siNA constructs provide significant inhibition of IL-13R gene expression in cell culture experiments as determined by levels of IL-13R mRNA when compared to appropriate controls.

### Example 10

### Indications

[0419] The siNA molecule of the invention can be used to prevent, inhibit or treat cancers and other proliferative conditions, viral infection, inflammatory disease, autoimmunity, respiratory disease, pulmonary disease, cardiovascular disease, nuerologic disease, renal disease, ocular disease, liver disease, mitochondrial disease, endocrine disease, prion disease, reproduction related diseases and conditions, and/or any other trait, disease or condition that is related to or will respond to the levels of interleukin and/or interleukin receptor in a cell or tissue, alone or in combination with other therapies. Non-limiting examples of respiratory diseases that can be treated using siNA molecules of the invention (e.g., siNA molecules targeting IL-4, IL-4R, IL-13, and/or IL-13R include asthma, chronic obstructive pulmonary disease or “COPD”, allergic rhinitis, sinusitis, pulmonary vasoconstriction, inflammation, allergies, impeded respiration, respiratory distress syndrome, cystic fibrosis, pulmonary hypertension, pulmonary vasoconstriction, emphysema.

[0420] The use of anticholinergic agents, anti-inflammatories, bronchodilators, adenosine inhibitors, adenosine A1 receptor inhibitors, non-selective M3 receptor antagonists such as atropine, ipratropium brominde and selective M3 receptor antagonists such as darifenacin and revatropate are all non-limiting examples of agents that can be combined with or used in conjunction with the nucleic acid molecules (e.g. siNA molecules) of the instant invention. Immunomodulators, chemotherapeutics, anti-inflammatory compounds, and anti-vrial compounds are additional non-limiting examples of pharmaceutical agents that can be combined with or used in conjunction with the nucleic acid molecules (e.g. siNA molecules) of the instant invention. Those skilled in the art will recognize that other drugs, compounds and therapies can similarly be readily combined with the nucleic acid molecules of the instant invention (e.g. siNA molecules) are hence within the scope of the instant invention.

### Example 11

### Diagnostic Uses

[0421] The siNA molecules of the invention can be used in a variety of diagnostic applications, such as in the identification of molecular targets (e.g., RNA) in a variety of applications, for example, in clinical, industrial, environmental, agricultural and/or research settings. Such diagnostic use of siNA molecules involves utilizing reconstituted RNAi systems, for example, using cellular lysates or partially purified cellular lysates. siNA molecules of this invention can be used as diagnostic tools to examine genetic drift and mutations within diseased cells or to detect the presence of endogenous or exogenous, for example viral, RNA in a cell. The close relationship between siNA activity and the structure of the target RNA allows the detection of mutations in any region of the molecule, which alters the base-pairing and three-dimensional structure of the target RNA. By using multiple siNA molecules described in this invention, one can map nucleotide changes, which are important to RNA structure and function in vitro, as well as in cells and tissues. Cleavage of target RNAs with siNA molecules can be used to inhibit gene expression and define the role of specified gene products in the progression of disease or infection. In this manner, other genetic targets can be defined as important mediators of the disease. These experiments will lead to better treatment of the disease progression by affording the possibility of combination therapies (e.g., multiple siNA molecules targeted to different genes, siNA molecules coupled with known small molecule inhibitors, or intermittent treatment with combinations siNA molecules and/or other chemical or biological molecules). Other in vitro uses of siNA molecules of this invention are well known in the art, and include detection of the presence of mRNAs associated with a disease, infection, or related condition. Such RNA is detected by determining the presence of a cleavage product after treatment with a siNA using standard methodologies, for example, fluorescence resonance emission transfer (FRET).

[0422] In a specific example, siNA molecules that cleave only wild-type or mutant forms of the target RNA are used for the assay. The first siNA molecules (i.e., those that cleave only wild-type forms of target RNA) are used to identify wild-type RNA present in the sample and the second siNA molecules (i.e., those that cleave only mutant forms of target RNA) are used to identify mutant RNA in the sample. As reaction controls, synthetic substrates of both wild-type and mutant RNA are cleaved by both siNA molecules to demonstrate the relative siNA efficiencies in the reactions and the absence of cleavage of the “non-targeted” RNA species. The cleavage products from the synthetic substrates also serve to generate size markers for the analysis of wild-type and mutant RNAs in the sample population. Thus, each analysis requires two siNA molecules, two substrates and one unknown sample, which is combined into six reactions. The presence of cleavage products is determined using an RNase protection assay so that full-length and cleavage fragments of each RNA can be analyzed in one lane of a polyacrylamide gel. It is not absolutely required to quantify the results to gain insight into the expression of mutant RNAs and putative risk of the desired phenotypic changes in target cells. The expression of mRNA whose protein product is implicated in the development of the phenotype (i.e., disease related or infection related) is adequate to establish risk. If probes of comparable specific activity are used for both transcripts, then a qualitative comparison of RNA levels is adequate and decreases the cost of the initial diagnosis. Higher mutant form to wild-type ratios are correlated with higher risk whether RNA levels are compared qualitatively or quantitatively.

[0423] All patents and publications mentioned in the specification are indicative of the levels of skill of those skilled in the art to which the invention pertains. All references cited in this disclosure are incorporated by reference to the same extent as if each reference had been incorporated by reference in its entirety individually.

[0424] One skilled in the art would readily appreciate that the present invention is well adapted to carry out the objects and obtain the ends and advantages mentioned, as well as those inherent therein. The methods and compositions described herein as presently representative of preferred embodiments are exemplary and are not intended as limitations on the scope of the invention. Changes therein and other uses will occur to those skilled in the art, which are encompassed within the spirit of the invention, are defined by the scope of the claims.

[0425] It will be readily apparent to one skilled in the art that varying substitutions and modifications can be made to the invention disclosed herein without departing from the scope and spirit of the invention. Thus, such additional embodiments are within the scope of the present invention and the following claims. The present invention teaches one skilled in the art to test various combinations and/or substitutions of chemical modifications described herein toward generating nucleic acid constructs with improved activity for mediating RNAi activity. Such improved activity can comprise improved stability, improved bioavailability, and/or improved activation of cellular responses mediating RNAi. Therefore, the specific embodiments described herein are not limiting and one skilled in the art can readily appreciate that specific combinations of the modifications described herein can be tested without undue experimentation toward identifying siNA molecules with improved RNAi activity.

[0426] The invention illustratively described herein suitably can be practiced in the absence of any element or elements, limitation or limitations that are not specifically disclosed herein. Thus, for example, in each instance herein any of the terms “comprising”, “consisting essentially of”, and “consisting of” may be replaced with either of the other two terms. The terms and expressions which have been employed are used as terms of description and not of limitation, and there is no intention that in the use of such terms and expressions of excluding any equivalents of the features shown and described or portions thereof, but it is recognized that various modifications are possible within the scope of the invention claimed. Thus, it should be understood that although the present invention has been specifically disclosed by preferred embodiments, optional features, modification and variation of the concepts herein disclosed may be resorted to by those skilled in the art, and that such modifications and variations are considered to be within the scope of this invention as defined by the description and the appended claims.

[0427] In addition, where features or aspects of the invention are described in terms of Markush groups or other grouping of alternatives, those skilled in the art will recognize that the invention is also thereby described in terms of any individual member or subgroup of members of the Markush group or other group.

TABLE I
interleukin and/or interleukin receptor Accession Numbers
Interleukin Family

| | |
|---|---|
| NM_000575 | Homo sapiens interleukin 1, alpha (IL1A), mRNA |
| NM_000576 | Homo sapiens interleukin 1, beta (IL1B), mRNA |
| NM_012275 | Homo sapiens interleukin 1 family, member 5 (delta) (IL1F5), mRNA |
| NM_014440 | Homo sapiens interleukin 1 family, member 6 (epsilon) (IL1F6), mRNA |
| NM_014439 | Homo sapiens interleukin 1 family, member 7 (zeta) (IL1F7), mRNA |
| NM_014438 | Homo sapiens interleukin 1 family, member 8 (eta) (IL1F8), mRNA |
| NM_019618 | Homo sapiens interleukin 1 family, member 9 (IL1F9), mRNA |
| NM_032556 | Homo sapiens interleukin 1 family, member 10 (theta) (IL1F10), mRNA |
| NM_000586 | Homo sapiens interleukin 2 (IL2), mRNA |
| NM_000588 | Homo sapiens interleukin 3 (colony-stimulating factor, multiple) (IL3), |
| | mRNA |
| NM_000589 | Homo sapiens interleukin 4 (IL4), mRNA |
| NM_000879 | Homo sapiens interleukin 5 (colony-stimulating factor, eosinophil) (IL5), |
| | mRNA |
| NM_000600 | Homo sapiens interleukin 6 (interferon, beta 2) (IL6), mRNA |
| NM_000880 | Homo sapiens interleukin 7 (IL7), mRNA |
| NM_000584 | Homo sapiens interleukin 8 (IL8), mRNA |
| NM_000590 | Homo sapiens interleukin 9 (IL9), mRNA |
| NM_000572 | Homo sapiens interleukin 10 (IL10), mRNA |
| NM_000641 | Homo sapiens interleukin 11 (IL11), mRNA |
| NM_000882 | Homo sapiens interleukin 12A (natural killer cell stimulatory factor 1, |
| | cytotoxic lymphocyte maturation factor 1, p35) (IL12A), mRNA |
| NM_002187 | Homo sapiens interleukin 12B (natural killer cell stimulatory factor 2, |
| | cytotoxic lymphocyte maturation factor 2, p40) (IL12B), mRNA |
| NM_002188 | Homo sapiens interleukin 13 (IL13), mRNA |
| L15344 | Homo sapiens interleukin 14 (IL14), mRNA |
| NM_000585 | Homo sapiens interleukin 15 (IL15), mRNA |
| NM_004513 | Homo sapiens interleukin 16 (lymphocyte chemoattractant factor) (IL16), |
| | mRNA |
| NM_002190 | Homo sapiens interleukin 17 (cytotoxic T-lymphocyte-associated serine |
| | esterase 8) (IL17), mRNA |
| NM_014443 | Homo sapiens interleukin 17B (IL17B), mRNA |
| NM_013278 | Homo sapiens interleukin 17C (IL17C), mRNA |
| NM_138284 | Homo sapiens interleukin 17D (IL17D), mRNA |
| NM_022789 | Homo sapiens interleukin 17E (IL17E), mRNA |
| NM_052872 | Homo sapiens interleukin 17F (IL17F), mRNA |
| NM_001562 | Homo sapiens interleukin 18 (interferon-gamma-inducing factor) (IL18), |
| | mRNA |
| NM_013371 | Homo sapiens interleukin 19 (IL19), mRNA |
| NM_018724 | Homo sapiens interleukin 20 (IL20), mRNA |
| NM_021803 | Homo sapiens interleukin 21 (IL21 antisense), mRNA |
| NM_020525 | Homo sapiens interleukin 22 (IL22), mRNA |
| NM_016584 | Homo sapiens interleukin 23, alpha subunit p19 (IL23A), mRNA |
| NM_006850 | Homo sapiens interleukin 24 (IL24), mRNA |
| NM_018402 | Homo sapiens interleukin 26 (IL26), mRNA |
| AL365373 | Homo sapiens interleukin 27 (IL27), mRNA |

Interleukin Receptor Family

| | |
|---|---|
| NM_000877 | Homo sapiens interleukin 1 receptor, type I (IL1R1), mRNA |
| NM_004633 | Homo sapiens interleukin 1 receptor, type II (IL1R2), mRNA |
| NM_016232 | Homo sapiens interleukin 1 receptor-like 1 (IL1RL1), mRNA |
| NM_003856 | Homo sapiens interleukin 1 receptor-like 1 (IL1RL1), mRNA |
| NM_003854 | Homo sapiens interleukin 1 receptor-like 2 (IL1RL2), mRNA |
| NM_000417 | Homo sapiens interleukin 2 receptor, alpha (IL2RA), mRNA |
| NM_000878 | Homo sapiens interleukin 2 receptor, beta (IL2RB), mRNA |
| NM_000206 | Homo sapiens interleukin 2 receptor, gamma (severe combined |
| | immunodeficiency) (IL2RG), mRNA |
| NM_002183 | Homo sapiens interleukin 3 receptor, alpha (low affinity) (IL3RA), |
| | mRNA |
| NM_000418 | Homo sapiens interleukin 4 receptor (IL4R), mRNA |
| NM_000564 | Homo sapiens interleukin 5 receptor, alpha (IL5RA), mRNA |
| NM_000565 | Homo sapiens interleukin 6 receptor (IL6R), mRNA |
| NM_002185 | Homo sapiens interleukin 7 receptor (IL7R), mRNA |
| NM_000634 | Homo sapiens interleukin 8 receptor, alpha (IL8RA), mRNA |
| NM_001557 | Homo sapiens interleukin 8 receptor, beta (IL8RB), mRNA |
| NM_002186 | Homo sapiens interleukin 9 receptor (IL9R), mRNA |
| NM_001558 | Homo sapiens interleukin 10 receptor, alpha (IL10RA), mRNA |
| NM_000628 | Homo sapiens interleukin 10 receptor, beta (IL10RB), mRNA |
| NM_004512 | Homo sapiens interleukin 11 receptor, alpha (IL11RA), mRNA |
| NM_005535 | Homo sapiens interleukin 12 receptor, beta 1 (IL12RB1), mRNA |
| NM_001559 | Homo sapiens interleukin 12 receptor, beta 2 (IL12RB2), mRNA |
| NM_001560 | Homo sapiens interleukin 13 receptor, alpha 1 (IL13RA1), mRNA |
| NM_000640 | Homo sapiens interleukin 13 receptor, alpha 2 (IL13RA2), mRNA |
| NM_002189 | Homo sapiens interleukin 15 receptor, alpha (IL15RA), mRNA |
| NM_014339 | Homo sapiens interleukin 17 receptor (IL17R), mRNA |
| NM_032732 | Homo sapiens interleukin 17 receptor C (IL-17RC), mRNA |
| NM_144640 | Homo sapiens interleukin 17 receptor E (IL-17RE), mRNA |
| NM_018725 | Homo sapiens interleukin 17B receptor (IL17BR), mRNA |
| NM_003855 | Homo sapiens interleukin 18 receptor 1 (IL18R1), mRNA |
| NM_003853 | Homo sapiens interleukin 18 receptor accessory protein (IL18RAP), |
| | mRNA |
| NM_014432 | Homo sapiens interleukin 20 receptor, alpha (IL20RA), mRNA |
| NM_021798 | Homo sapiens interleukin 21 receptor (IL21 antisenseR), mRNA |
| NM_021258 | Homo sapiens interleukin 22 receptor (IL22R), mRNA |
| NM_144701 | Homo sapiens interleukin 23 receptor (IL23R), mRNA |

Interleukin Associated Proteins

| | |
|---|---|
| NM_004514 | Homo sapiens interleukin enhancer binding factor 1 (ILF1), mRNA |
| NM_004515 | Homo sapiens interleukin enhancer binding factor 2, 45 kD (ILF2), mRNA |
| NM_012218 | Homo sapiens interleukin enhancer binding factor 3, 90 kD (ILF3), mRNA |
| NM_004516 | Homo sapiens interleukin enhancer binding factor 3, 90 kD (ILF3), mRNA |
| NM_016123 | Homo sapiens interleukin-1 receptor associated kinase 4 (IRAK4), mRNA |
| NM_001569 | Homo sapiens interleukin-1 receptor-associated kinase 1 (IRAK1), |
| | mRNA |
| NM_001570 | Homo sapiens interleukin-1 receptor-associated kinase 2 (IRAK2), |
| | mRNA |
| NM_007199 | Homo sapiens interleukin-1 receptor-associated kinase 3 (IRAK3), |
| | mRNA |
| NM_134470 | Homo sapiens interleukin 1 receptor accessory protein (IL1RAP), mRNA |
| NM_002182 | Homo sapiens interleukin 1 receptor accessory protein (IL1RAP), mRNA |
| NM_014271 | Homo sapiens interleukin 1 receptor accessory protein-like 1 |
| | (IL1RAPL1), mRNA |
| NM_017416 | Homo sapiens interleukin 1 receptor accessory protein-like 2 |
| | (IL1RAPL2), mRNA |
| NM_000577 | Homo sapiens interleukin 1 receptor antagonist (IL1RN), mRNA |
| NM_002184 | Homo sapiens interleukin 6 signal transducer (gp130, oncostatin M |
| | receptor) (IL6ST), mRNA |
| NM_005699 | Homo sapiens interleukin 18 binding protein (IL18BP), mRNA |

[0428] TABLE II
Interleukin and Interleukin receptor siNA and Target Sequences

IL2RG NM_000206

| | | |
|---|---|---|
| Seq | Seq | Seq |

| | | | | | | | | |
|---|---|---|---|---|---|---|---|---|
| Pos | Seq | ID | UPos | Upper seq | ID | LPos | Lower seq | ID |

| | | | | | | | | |
|---|---|---|---|---|---|---|---|---|
| 3 | AGAGCAAGCGCCAUGUUGA | 1 | 3 | AGAGCAAGCGCCAUGUUGA | 1 | 25 | UCAACAUGGCGCUUGCUCU | 82 |
| 21 | AAGCCAUCAUUACCAUUCA | 2 | 21 | AAGCCAUCAUUACCAUUCA | 2 | 43 | UGAAUGGUAAUGAUGGCUU | 83 |
| 39 | ACAUCCCUCUUAUUCCUGC | 3 | 39 | ACAUCCCUCUUAUUCCUGC | 3 | 61 | GCAGGAAUAAGAGGGAUGU | 84 |
| 57 | CAGCUGCCCCUGCUGGGAG | 4 | 57 | CAGCUGCCCCUGCUGGGAG | 4 | 79 | CUCCCAGCAGGGGCAGCUG | 85 |
| 75 | GUGGGGCUGAACACGACAA | 5 | 75 | GUGGGGCUGAACACGACAA | 5 | 97 | UUGUCGUGUUCAGCCCCAC | 86 |
| 93 | AUUCUGACGCCCAAUGGGA | 6 | 93 | AUUCUGACGCCCAAUGGGA | 6 | 115 | UCCCAUUGGGCGUCAGAAU | 87 |
| 111 | AAUGAAGACACCACAGCUG | 7 | 111 | AAUGAAGACACCACAGCUG | 7 | 133 | CAGCUGUGGUGUCUUCAUU | 88 |
| 129 | GAUUUCUUCCUGACCACUA | 8 | 129 | GAUUUCUUCCUGACCACUA | 8 | 151 | UAGUGGUCAGGAAGAAAUC | 89 |
| 147 | AUGCCCACUGACUCCCUCA | 9 | 147 | AUGCCCACUGACUCCCUCA | 9 | 169 | UGAGGGAGUCAGUGGGCAU | 90 |
| 165 | AGUGUUUCCACUCUGCCCC | 10 | 165 | AGUGUUUCCACUCUGCCCC | 10 | 187 | GGGGCAGAGUGGAAACACU | 91 |
| 183 | CUCCCAGAGGUUCAGUGUU | 11 | 183 | CUCCCAGAGGUUCAGUGUU | 11 | 205 | AACACUGAACCUCUGGGAG | 92 |
| 201 | UUUGUGUUCAAUGUCGAGU | 12 | 201 | UUUGUGUUCAAUGUCGAGU | 12 | 223 | ACUCGACAUUGAACACAAA | 93 |
| 219 | UACAUGAAUUGCACUUGGA | 13 | 219 | UACAUGAAUUGCACUUGGA | 13 | 241 | UCCAAGUGCAAUUCAUGUA | 94 |
| 237 | AACAGCAGCUCUGAGCCCC | 14 | 237 | AACAGCAGCUCUGAGCCCC | 14 | 259 | GGGGCUCAGAGCUGCUGUU | 95 |
| 255 | CAGCCUACCAACCUCACUC | 15 | 255 | CAGCCUACCAACCUCACUC | 15 | 277 | GAGUGAGGUUGGUAGGCUG | 96 |
| 273 | CUGCAUUAUUGGUACAAGA | 16 | 273 | CUGCAUUAUUGGUACAAGA | 16 | 295 | UCUUGUACCAAUAAUGCAG | 97 |
| 291 | AACUCGGAUAAUGAUAAAG | 17 | 291 | AACUCGGAUAAUGAUAAAG | 17 | 313 | CUUUAUCAUUAUCCGAGUU | 98 |
| 309 | GUCCAGAAGUGCAGCCACU | 18 | 309 | GUCCAGAAGUGCAGCCACU | 18 | 331 | AGUGGCUGCACUUCUGGAC | 99 |
| 327 | UAUCUAUUCUCUGAAGAAA | 19 | 327 | UAUCUAUUCUCUGAAGAAA | 19 | 349 | UUUCUUCAGAGAAUAGAUA | 100 |
| 345 | AUCACUUCUGGCUGUCAGU | 20 | 345 | AUCACUUCUGGCUGUCAGU | 20 | 367 | ACUGACAGCCAGAAGUGAU | 101 |
| 363 | UUGCAAAAAAAGGAGAUCC | 21 | 363 | UUGCAAAAAAAGGAGAUCC | 21 | 385 | GGAUCUCCUUUUUUUGCAA | 102 |
| 381 | CACCUCUACCAAACAUUUG | 22 | 381 | CACCUCUACCAAACAUUUG | 22 | 403 | CAAAUGUUUGGUAGAGGUG | 103 |
| 399 | GUUGUUCAGCUCCAGGACC | 23 | 399 | GUUGUUCAGCUCCAGGACC | 23 | 421 | GGUCCUGGAGCUGAACAAC | 104 |
| 417 | CCACGGGAACCCAGGAGAC | 24 | 417 | CCACGGGAACCCAGGAGAC | 24 | 439 | GUCUCCUGGGUUCCCGUGG | 105 |
| 435 | CAGGCCACACAGAUGCUAA | 25 | 435 | CAGGCCACACAGAUGCUAA | 25 | 457 | UUAGCAUCUGUGUGGCCUG | 106 |
| 453 | AAACUGCAGAAUCUGGUGA | 26 | 453 | AAACUGCAGAAUCUGGUGA | 26 | 475 | UCACCAGAUUCUGCAGUUU | 107 |
| 471 | AUCCCCUGGGCUCCAGAGA | 27 | 471 | AUCCCCUGGGCUCCAGAGA | 27 | 493 | UCUCUGGAGCCCAGGGGAU | 108 |
| 489 | AACCUAACACUUCACAAAC | 28 | 489 | AACCUAACACUUCACAAAC | 28 | 511 | GUUUGUGAAGUGUUAGGUU | 109 |
| 507 | CUGAGUGAAUCCCAGCUAG | 29 | 507 | CUGAGUGAAUCCCAGCUAG | 29 | 529 | CUAGCUGGGAUUCACUCAG | 110 |
| 525 | GAACUGAACUGGAACAACA | 30 | 525 | GAACUGAACUGGAACAACA | 30 | 547 | UGUUGUUCCAGUUCAGUUC | 111 |
| 543 | AGAUUCUUGAACCACUGUU | 31 | 543 | AGAUUCUUGAACCACUGUU | 31 | 565 | AACAGUGGUUCAAGAAUCU | 112 |
| 561 | UUGGAGCACUUGGUGCAGU | 32 | 561 | UUGGAGCACUUGGUGCAGU | 32 | 583 | ACUGCACCAAGUGCUCCAA | 113 |
| 579 | UACCGGACUGACUGGGACC | 33 | 579 | UACCGGACUGACUGGGACC | 33 | 601 | GGUCCCAGUCAGUCCGGUA | 114 |
| 597 | CACAGCUGGACUGAACAAU | 34 | 597 | CACAGCUGGACUGAACAAU | 34 | 619 | AUUGUUCAGUCCAGCUGUG | 115 |
| 615 | UCAGUGGAUUAUAGACAUA | 35 | 615 | UCAGUGGAUUAUAGACAUA | 35 | 637 | UAUGUCUAUAAUCCACUGA | 116 |
| 633 | AAGUUCUCCUUGCCUAGUG | 36 | 633 | AAGUUCUCCUUGCCUAGUG | 36 | 655 | CACUAGGCAAGGAGAACUU | 117 |
| 651 | GUGGAUGGGCAGAAACGCU | 37 | 651 | GUGGAUGGGCAGAAACGCU | 37 | 673 | AGCGUUUCUGCCCAUCCAC | 118 |
| 669 | UACACGUUUCGUGUUCGGA | 38 | 669 | UACACGUUUCGUGUUCGGA | 38 | 691 | UCCGAACACGAAACGUGUA | 119 |
| 687 | AGCCGCUUUAACCCACUCU | 39 | 687 | AGCCGCUUUAACCCACUCU | 39 | 709 | AGAGUGGGUUAAAGCGGCU | 120 |
| 705 | UGUGGAAGUGCUCAGCAUU | 40 | 705 | UGUGGAAGUGCUCAGCAUU | 40 | 727 | AAUGCUGAGCACUUCCACA | 121 |
| 723 | UGGAGUGAAUGGAGCCACC | 41 | 723 | UGGAGUGAAUGGAGCCACC | 41 | 745 | GGUGGCUCCAUUCACUCCA | 122 |
| 741 | CCAAUCCACUGGGGGAGCA | 42 | 741 | CCAAUCCACUGGGGGAGCA | 42 | 763 | UGCUCCCCCAGUGGAUUGG | 123 |
| 759 | AAUACUUCAAAAGAGAAUC | 43 | 759 | AAUACUUCAAAAGAGAAUC | 43 | 781 | GAUUCUCUUUUGAAGUAUU | 124 |
| 777 | CCUUUCCUGUUUGCAUUGG | 44 | 777 | CCUUUCCUGUUUGCAUUGG | 44 | 799 | CCAAUGCAAACAGGAAAGG | 125 |
| 795 | GAAGCCGUGGUUAUCUCUG | 45 | 795 | GAAGCCGUGGUUAUCUCUG | 45 | 817 | CAGAGAUAACCACGGCUUC | 126 |
| 813 | GUUGGCUCCAUGGGAUUGA | 46 | 813 | GUUGGCUCCAUGGGAUUGA | 46 | 835 | UCAAUCCCAUGGAGCCAAC | 127 |
| 831 | AUUAUCAGCCUUCUCUGUG | 47 | 831 | AUUAUCAGCCUUCUCUGUG | 47 | 853 | CACAGAGAAGGCUGAUAAU | 128 |
| 849 | GUGUAUUUCUGGCUGGAAC | 48 | 849 | GUGUAUUUCUGGCUGGAAC | 48 | 871 | GUUCCAGCCAGAAAUACAC | 129 |
| 867 | CGGACGAUGCCCCGAAUUC | 49 | 867 | CGGACGAUGCCCCGAAUUC | 49 | 889 | GAAUUCGGGGCAUCGUCCG | 130 |
| 885 | CCCACCCUGAAGAACCUAG | 50 | 885 | CCCACCCUGAAGAACCUAG | 50 | 907 | CUAGGUUCUUCAGGGUGGG | 131 |
| 903 | GAGGAUCUUGUUACUGAAU | 51 | 903 | GAGGAUCUUGUUACUGAAU | 51 | 925 | AUUCAGUAACAAGAUCCUC | 132 |
| 921 | UACCACGGGAACUUUUCGG | 52 | 921 | UACCACGGGAACUUUUCGG | 52 | 943 | CCGAAAAGUUCCCGUGGUA | 133 |
| 939 | GCCUGGAGUGGUGUGUCUA | 53 | 939 | GCCUGGAGUGGUGUGUCUA | 53 | 961 | UAGACACACCACUCCAGGC | 134 |
| 957 | AAGGGACUGGCUGAGAGUC | 54 | 957 | AAGGGACUGGCUGAGAGUC | 54 | 979 | GACUCUCAGCCAGUCCCUU | 135 |
| 975 | CUGCAGCCAGACUACAGUG | 55 | 975 | CUGCAGCCAGACUACAGUG | 55 | 997 | CACUGUAGUCUGGCUGCAG | 136 |
| 993 | GAACGACUCUGCCUCGUCA | 56 | 993 | GAACGACUCUGCCUCGUCA | 56 | 1015 | UGACGAGGCAGAGUCGUUC | 137 |
| 1011 | AGUGAGAUUCCCCCAAAAG | 57 | 1011 | AGUGAGAUUCCCCCAAAAG | 57 | 1033 | CUUUUGGGGGAAUCUCACU | 138 |
| 1029 | GGAGGGGCCCUUGGGGAGG | 58 | 1029 | GGAGGGGCCCUUGGGGAGG | 58 | 1051 | CCUCCCCAAGGGCCCCUCC | 139 |
| 1047 | GGGCCUGGGGCCUCCCCAU | 59 | 1047 | GGGCCUGGGGCCUCCCCAU | 59 | 1069 | AUGGGGAGGCCCCAGGCCC | 140 |
| 1065 | UGCAACCAGCAUAGCCCCU | 60 | 1065 | UGCAACCAGCAUAGCCCCU | 60 | 1087 | AGGGGCUAUGCUGGUUGCA | 141 |
| 1083 | UACUGGGCCCCCCCAUGUU | 61 | 1083 | UACUGGGCCCCCCCAUGUU | 61 | 1105 | AACAUGGGGGGGCCCAGUA | 142 |
| 1101 | UACACCCUAAAGCCUGAAA | 62 | 1101 | UACACCCUAAAGCCUGAAA | 62 | 1123 | UUUCAGGCUUUAGGGUGUA | 143 |
| 1119 | ACCUGAACCCCAAUCCUCU | 63 | 1119 | ACCUGAACCCCAAUCCUCU | 63 | 1141 | AGAGGAUUGGGGUUCAGGU | 144 |
| 1137 | UGACAGAAGAACCCCAGGG | 64 | 1137 | UGACAGAAGAACCCCAGGG | 64 | 1159 | CCCUGGGGUUCUUCUGUCA | 145 |
| 1155 | GUCCUGUAGCCCUAAGUGG | 65 | 1155 | GUCCUGUAGCCCUAAGUGG | 65 | 1177 | CCACUUAGGGCUACAGGAC | 146 |
| 1173 | GUACUAACUUUCCUUCAUU | 66 | 1173 | GUACUAACUUUCCUUCAUU | 66 | 1195 | AAUGAAGGAAAGUUAGUAC | 147 |
| 1191 | UCAACCCACCUGCGUCUCA | 67 | 1191 | UCAACCCACCUGCGUCUCA | 67 | 1213 | UGAGACGCAGGUGGGUUGA | 148 |
| 1209 | AUACUCACCUCACCCCACU | 68 | 1209 | AUACUCACCUCACCCCACU | 68 | 1231 | AGUGGGGUGAGGUGAGUAU | 149 |
| 1227 | UGUGGCUGAUUUGGAAUUU | 69 | 1227 | UGUGGCUGAUUUGGAAUUU | 69 | 1249 | AAAUUCCAAAUCAGCCACA | 150 |
| 1245 | UUGUGCCCCCAUGUAAGCA | 70 | 1245 | UUGUGCCCCCAUGUAAGCA | 70 | 1267 | UGCUUACAUGGGGGCACAA | 151 |
| 1263 | ACCCCUUCAUUUGGCAUUC | 71 | 1263 | ACCCCUUCAUUUGGCAUUC | 71 | 1285 | GAAUGCCAAAUGAAGGGGU | 152 |
| 1281 | CCCCACUUGAGAAUUACCC | 72 | 1281 | CCCCACUUGAGAAUUACCC | 72 | 1303 | GGGUAAUUCUCAAGUGGGG | 153 |
| 1299 | CUUUUGCCCCGAACAUGUU | 73 | 1299 | CUUUUGCCCCGAACAUGUU | 73 | 1321 | AACAUGUUCGGGGCAAAAG | 154 |
| 1317 | UUUUCUUCUCCCUCAGUCU | 74 | 1317 | UUUUCUUCUCCCUCAGUCU | 74 | 1339 | AGACUGAGGGAGAAGAAAA | 155 |
| 1335 | UGGCCCUUCCUUUUCGCAG | 75 | 1335 | UGGCCCUUCCUUUUCGCAG | 75 | 1357 | CUGCGAAAAGGAAGGGCCA | 156 |
| 1353 | GGAUUCUUCCUCCCUCCCU | 76 | 1353 | GGAUUCUUCCUCCCUCCCU | 76 | 1375 | AGGGAGGGAGGAAGAAUCC | 157 |
| 1371 | UCUUUCCCUCCCUUCCUCU | 77 | 1371 | UCUUUCCCUCCCUUCCUCU | 77 | 1393 | AGAGGAAGGGAGGGAAAGA | 158 |
| 1389 | UUUCCAUCUACCCUCCGAU | 78 | 1389 | UUUCCAUCUACCCUCCGAU | 78 | 1411 | AUCGGAGGGUAGAUGGAAA | 159 |
| 1407 | UUGUUCCUGAACCGAUGAG | 79 | 1407 | UUGUUCCUGAACCGAUGAG | 79 | 1429 | CUCAUCGGUUCAGGAACAA | 160 |
| 1425 | GAAAUAAAGUUUCUGUUGA | 80 | 1425 | GAAAUAAAGUUUCUGUUGA | 80 | 1447 | UCAACAGAAACUUUAUUUC | 161 |
| 1431 | AAGUUUCUGUUGAUAAUCA | 81 | 1431 | AAGUUUCUGUUGAUAAUCA | 81 | 1453 | UGAUUAUCAACAGAAACUU | 162 |

IL4 NM_000589

| | | |
|---|---|---|
| Seq | Seq | Seq |

| | | | | | | | | |
|---|---|---|---|---|---|---|---|---|
| Pos | Seq | ID | UPos | Upper seq | ID | LPos | Lower seq | ID |

| | | | | | | | | |
|---|---|---|---|---|---|---|---|---|
| 3 | CUAUGCAAAGCAAAAAGCC | 163 | 3 | CUAUGCAAAGCAAAAAGCC | 163 | 25 | GGCUUUUUGCUUUGCAUAG | 214 |
| 21 | CAGCAGCAGCCCCAAGCUG | 164 | 21 | CAGCAGCAGCCCCAAGCUG | 164 | 43 | CAGCUUGGGGCUGCUGCUG | 215 |
| 39 | GAUAAGAUUAAUCUAAAGA | 165 | 39 | GAUAAGAUUAAUCUAAAGA | 165 | 61 | UCUUUAGAUUAAUCUUAUC | 216 |
| 57 | AGCAAAUUAUGGUGUAAUU | 166 | 57 | AGCAAAUUAUGGUGUAAUU | 166 | 79 | AAUUACACCAUAAUUUGCU | 217 |
| 75 | UUCCUAUGCUGAAACUUUG | 167 | 75 | UUCCUAUGCUGAAACUUUG | 167 | 97 | CAAAGUUUCAGCAUAGGAA | 218 |
| 93 | GUAGUUAAUUUUUUAAAAA | 168 | 93 | GUAGUUAAUUUUUUAAAAA | 168 | 115 | UUUUUAAAAAAUUAACUAC | 219 |
| 111 | AGGUUUCAUUUUCCUAUUG | 169 | 111 | AGGUUUCAUUUUCCUAUUG | 169 | 133 | CAAUAGGAPAAUGAAACCU | 220 |
| 129 | GGUCUGAUUUCACAGGAAC | 170 | 129 | GGUCUGAUUUCACAGGAAC | 170 | 151 | GUUCCUGUGAAAUCAGACC | 221 |
| 147 | CAUUUUACCUGUUUGUGAG | 171 | 147 | CAUUUUACCUGUUUGUGAG | 171 | 169 | CUCACAAACAGGUAAAAUG | 222 |
| 165 | GGCAUUUUUUCUCCUGGAA | 172 | 165 | GGCAUUUUUUCUCCUGGAA | 172 | 187 | UUCCAGGAGAAAAAAUGCC | 223 |
| 183 | AGAGAGGUGCUGAUUGGCC | 173 | 183 | AGAGAGGUGCUGAUUGGCC | 173 | 205 | GGCCAAUCAGCACCUCUCU | 224 |
| 201 | CCCAAGUGACUGACAAUCU | 174 | 201 | CCCAAGUGACUGACAAUCU | 174 | 223 | AGAUUGUCAGUCACUUGGG | 225 |
| 219 | UGGUGUAACGAAAAUUUCC | 175 | 219 | UGGUGUAACGAAAAUUUCC | 175 | 241 | GGAAAUUUUCGUUACACCA | 226 |
| 237 | CAAUGUAAACUCAUUUUCC | 176 | 237 | CAAUGUAAACUCAUUUUCC | 176 | 259 | GGAAAAUGAGUUUACAUUG | 227 |
| 255 | CCUCGGUUUCAGCAAUUUU | 177 | 255 | CCUCGGUUUCAGCAAUUUU | 177 | 277 | AAAAUUGCUGAAACCGAGG | 228 |
| 273 | UAAAUCUAUAUAUAGAGAU | 178 | 273 | UAAAUCUAUAUAUAGAGAU | 178 | 295 | AUCUCUAUAUAUAGAUUUA | 229 |
| 291 | UAUCUUUGUCAGCAUUGCA | 179 | 291 | UAUCUUUGUCAGCAUUGCA | 179 | 313 | UGCAAUGCUGACAAAGAUA | 230 |
| 309 | AUCGUUAGCUUCUCCUGAU | 180 | 309 | AUCGUUAGCUUCUCCUGAU | 180 | 331 | AUCAGGAGAAGCUAACGAU | 231 |
| 327 | UAAACUAAUUGCCUCACAU | 181 | 327 | UAAACUAAUUGCCUCACAU | 181 | 349 | AUGUGAGGCAAUUAGUUUA | 232 |
| 345 | UUGUCACUGCAAAUCGACA | 182 | 345 | UUGUCACUGCAAAUCGACA | 182 | 367 | UGUCGAUUUGCAGUGACAA | 233 |
| 363 | ACCUAUUAAUGGGUCUCAC | 183 | 363 | ACCUAUUAAUGGGUCUCAC | 183 | 385 | GUGAGACCCAUUAAUAGGU | 234 |
| 381 | CCUCCCAACUGCUUCCCCC | 184 | 381 | CCUCCCAACUGCUUCCCCC | 184 | 403 | GGGGGAAGCAGUUGGGAGG | 235 |
| 399 | CUCUGUUCUUCCUGCUAGC | 185 | 399 | CUCUGUUCUUCCUGCUAGC | 185 | 421 | GCUAGCAGGAAGAACAGAG | 236 |
| 417 | CAUGUGCCGGCAACUUUGU | 186 | 417 | CAUGUGCCGGCAACUUUGU | 186 | 439 | ACAAAGUUGCCGGCACAUG | 237 |
| 435 | UCCACGGACACAAGUGCGA | 187 | 435 | UCCACGGACACAAGUGCGA | 187 | 457 | UCGCACUUGUGUCCGUGGA | 238 |
| 453 | AUAUCACCUUACAGGAGAU | 188 | 453 | AUAUCACCUUACAGGAGAU | 188 | 475 | AUCUCCUGUAAGGUGAUAU | 239 |
| 471 | UCAUCAAAACUUUGAACAG | 189 | 471 | UCAUCAAAACUUUGAACAG | 189 | 493 | CUGUUCAAAGUUUUGAUGA | 240 |
| 489 | GCCUCACAGAGCAGAAGAC | 190 | 489 | GCCUCACAGAGCAGAAGAC | 190 | 511 | GUCUUCUGCUCUGUGAGGC | 241 |
| 507 | CUCUGUGCACCGAGUUGAC | 191 | 507 | CUCUGUGCACCGAGUUGAC | 191 | 529 | GUCAACUCGGUGCACAGAG | 242 |
| 525 | CCGUAACAGACAUCUUUGC | 192 | 525 | CCGUAACAGACAUCUUUGC | 192 | 547 | GCAAAGAUGUCUGUUACGG | 243 |
| 543 | CUGCCUCCAAGAACACAAC | 193 | 543 | CUGCCUCCAAGAACACAAC | 193 | 565 | GUUGUGUUCUUGGAGGCAG | 244 |
| 561 | CUGAGAAGGAAACCUUCUG | 194 | 561 | CUGAGAAGGAAACCUUCUG | 194 | 583 | CAGAAGGUUUCCUUCUCAG | 245 |
| 579 | GCAGGGCUGCGACUGUGCU | 195 | 579 | GCAGGGCUGCGACUGUGCU | 195 | 601 | AGCACAGUCGCAGCCCUGC | 246 |
| 597 | UCCGGCAGUUCUACAGCCA | 196 | 597 | UCCGGCAGUUCUACAGCCA | 196 | 619 | UGGCUGUAGAACUGCCGGA | 247 |
| 615 | ACCAUGAGAAGGACACUCG | 197 | 615 | ACCAUGAGAAGGACACUCG | 197 | 637 | CGAGUGUCCUUCUCAUGGU | 248 |
| 633 | GCUGCCUGGGUGCGACUGC | 198 | 633 | GCUGCCUGGGUGCGACUGC | 198 | 655 | GCAGUCGCACCCAGGCAGC | 249 |
| 651 | CACAGCAGUUCCACAGGCA | 199 | 651 | CACAGCAGUUCCACAGGCA | 199 | 673 | UGCCUGUGGAACUGCUGUG | 250 |
| 669 | ACAAGCAGCUGAUCCGAUU | 200 | 669 | ACAAGCAGCUGAUCCGAUU | 200 | 691 | AAUCGGAUCAGCUGCUUGU | 251 |
| 687 | UCCUGAAACGGCUCGACAG | 201 | 687 | UCCUGAAACGGCUCGACAG | 201 | 709 | CUGUCGAGCCGUUUCAGGA | 252 |
| 705 | GGAACCUCUGGGGCCUGGC | 202 | 705 | GGAACCUCUGGGGCCUGGC | 202 | 727 | GCCAGGCCCCAGAGGUUCC | 253 |
| 723 | CGGGCUUGAAUUCCUGUCC | 203 | 723 | CGGGCUUGAAUUCCUGUCC | 203 | 745 | GGACAGGAAUUCAAGCCCG | 254 |
| 741 | CUGUGAAGGAAGCCAACCA | 204 | 741 | CUGUGAAGGAAGCCAACCA | 204 | 763 | UGGUUGGCUUCCUUCACAG | 255 |
| 759 | AGAGUACGUUGGAAAACUU | 205 | 759 | AGAGUACGUUGGAAAACUU | 205 | 781 | AAGUUUUCCAACGUACUCU | 256 |
| 777 | UCUUGGAAAGGCUAAAGAC | 206 | 777 | UCUUGGAAAGGCUAAAGAC | 206 | 799 | GUCUUUAGCCUUUCCAAGA | 257 |
| 795 | CGAUCAUGAGAGAGAAAUA | 207 | 795 | CGAUCAUGAGAGAGAAAUA | 207 | 817 | UAUUUCUCUCUCAUGAUCG | 258 |
| 813 | AUUCAAAGUGUUCGAGCUG | 208 | 813 | AUUCAAAGUGUUCGAGCUG | 208 | 835 | CAGCUCGAACACUUUGAAU | 259 |
| 831 | GAAUAUUUUAAUUUAUGAG | 209 | 831 | GAAUAUUUUAAUUUAUGAG | 209 | 853 | CUCAUAAAUUAAAAUAUUC | 260 |
| 849 | GUUUUUGAUAGCUUUAUUU | 210 | 849 | GUUUUUGAUAGCUUUAUUU | 210 | 871 | AAAUAAAGCUAUCAAAAAC | 261 |
| 867 | UUUUAAGUAUUUAUAUAUU | 211 | 867 | UUUUAAGUAUUUAUAUAUU | 211 | 889 | AAUAUAUAAAUACUUAAAA | 262 |
| 885 | UUAUAACUCAUCAUAAAAU | 212 | 885 | UUAUAACUCAUCAUAAAAU | 212 | 907 | AUUUUAUGAUGAGUUAUAA | 263 |
| 901 | AAUAAAGUAUAUAUAGAAU | 213 | 901 | AAUAAAGUAUAUAUAGAAU | 213 | 923 | AUUCUAUAUAUACUUUAUU | 264 |

IL4R NM_000418

| | | |
|---|---|---|
| Seq | Seq | Seq |

| | | | | | | | | |
|---|---|---|---|---|---|---|---|---|
| Pos | Seq | ID | UPos | Upper seq | ID | LPos | Lower seq | ID |

| | | | | | | | | |
|---|---|---|---|---|---|---|---|---|
| 3 | CGAAUGGAGCAGGGGCGCG | 265 | 3 | CGAAUGGAGCAGGGGCGCG | 265 | 25 | CGCGCCCCUGCUCCAUUCG | 465 |
| 21 | GCAGAUAAUUAAAGAUUUA | 266 | 21 | GCAGAUAAUUAAAGAUUUA | 266 | 43 | UAAAUCUUUAAUUAUCUGC | 466 |
| 39 | ACACACAGCUGGAAGAAAU | 267 | 39 | ACACACAGCUGGAAGAAAU | 267 | 61 | AUUUCUUCCAGCUGUGUGU | 467 |
| 57 | UCAUAGAGAAGCCGGGCGU | 268 | 57 | UCAUAGAGAAGCCGGGCGU | 268 | 79 | ACGCCCGGCUUCUCUAUGA | 468 |
| 75 | UGGUGGCUCAUGCCUAUAA | 269 | 75 | UGGUGGCUCAUGCCUAUAA | 269 | 97 | UUAUAGGCAUGAGCCACCA | 469 |
| 93 | AUCCCAGCACUUUUGGAGG | 270 | 93 | AUCCCAGCACUUUUGGAGG | 270 | 115 | CCUCCAAAAGUGCUGGGAU | 470 |
| 111 | GCUGAGGCGGGCAGAUCAC | 271 | 111 | GCUGAGGCGGGCAGAUCAC | 271 | 133 | GUGAUCUGCCCGCCUCAGC | 471 |
| 129 | CUUGAGAUCAGGAGUUCGA | 272 | 129 | CUUGAGAUCAGGAGUUCGA | 272 | 151 | UCGAACUCCUGAUCUCAAG | 472 |
| 147 | AGACCAGCCUGGUGCCUUG | 273 | 147 | AGACCAGCCUGGUGCCUUG | 273 | 169 | CAAGGCACCAGGCUGGUCU | 473 |
| 165 | GGCAUCUCCCAAUGGGGUG | 274 | 165 | GGCAUCUCCCAAUGGGGUG | 274 | 187 | CACCCCAUUGGGAGAUGCC | 474 |
| 183 | GGCUUUGCUCUGGGCUCCU | 275 | 183 | GGCUUUGCUCUGGGCUCCU | 275 | 205 | AGGAGCCCAGAGCAAAGCC | 475 |
| 201 | UGUUCCCUGUGAGCUGCCU | 276 | 201 | UGUUCCCUGUGAGCUGCCU | 276 | 223 | AGGCAGCUCACAGGGAACA | 476 |
| 219 | UGGUCCUGCUGCAGGUGGC | 277 | 219 | UGGUCCUGCUGCAGGUGGC | 277 | 241 | GCCACCUGCAGCAGGACCA | 477 |
| 237 | CAAGCUCUGGGAACAUGAA | 278 | 237 | CAAGCUCUGGGAACAUGAA | 278 | 259 | UUCAUGUUCCCAGAGCUUG | 478 |
| 255 | AGGUCUUGCAGGAGCCCAC | 279 | 255 | AGGUCUUGCAGGAGCCCAC | 279 | 277 | GUGGGCUCCUGCAAGACCU | 479 |
| 273 | CCUGCGUCUCCGACUACAU | 280 | 273 | CCUGCGUCUCCGACUACAU | 280 | 295 | AUGUAGUCGGAGACGCAGG | 480 |
| 291 | UGAGCAUCUCUACUUGCGA | 281 | 291 | UGAGCAUCUCUACUUGCGA | 281 | 313 | UCGCAAGUAGAGAUGCUCA | 481 |
| 309 | AGUGGAAGAUGAAUGGUCC | 282 | 309 | AGUGGAAGAUGAAUGGUCC | 282 | 331 | GGACCAUUCAUCUUCCACU | 482 |
| 327 | CCACCAAUUGCAGCACCGA | 283 | 327 | CCACCAAUUGCAGCACCGA | 283 | 349 | UCGGUGCUGCAAUUGGUGG | 483 |
| 345 | AGCUCCGCCUGUUGUACCA | 284 | 345 | AGCUCCGCCUGUUGUACCA | 284 | 367 | UGGUACAACAGGCGGAGCU | 484 |
| 363 | AGCUGGUUUUUCUGCUCUC | 285 | 363 | AGCUGGUUUUUCUGCUCUC | 285 | 385 | GAGAGCAGAAAAACCAGCU | 485 |
| 381 | CCGAAGCCCACACGUGUAU | 286 | 381 | CCGAAGCCCACACGUGUAU | 286 | 403 | AUACACGUGUGGGCUUCGG | 486 |
| 399 | UCCCUGAGAACAACGGAGG | 287 | 399 | UCCCUGAGAACAACGGAGG | 287 | 421 | CCUCCGUUGUUCUCAGGGA | 487 |
| 417 | GCGCGGGGUGCGUGUGCCA | 288 | 417 | GCGCGGGGUGCGUGUGCCA | 288 | 439 | UGGCACACGCACCCCGCGC | 488 |
| 435 | ACCUGCUCAUGGAUGACGU | 289 | 435 | ACCUGCUCAUGGAUGACGU | 289 | 457 | ACGUCAUCCAUGAGCAGGU | 489 |
| 453 | UGGUCAGUGCGGAUAACUA | 290 | 453 | UGGUCAGUGCGGAUAACUA | 290 | 475 | UAGUUAUCCGCACUGACCA | 490 |
| 471 | AUACACUGGACCUGUGGGC | 291 | 471 | AUACACUGGACCUGUGGGC | 291 | 493 | GCCCACAGGUCCAGUGUAU | 491 |
| 489 | CUGGGCAGCAGCUGCUGUG | 292 | 489 | CUGGGCAGCAGCUGCUGUG | 292 | 511 | CACAGCAGCUGCUGCCCAG | 492 |
| 507 | GGAAGGGCUCCUUCAAGCC | 293 | 507 | GGAAGGGCUCCUUCAAGCC | 293 | 529 | GGCUUGAAGGAGCCCUUCC | 493 |
| 525 | CCAGCGAGCAUGUGAAACC | 294 | 525 | CCAGCGAGCAUGUGAAACC | 294 | 547 | GGUUUCACAUGCUCGCUGG | 494 |
| 543 | CCAGGGCCCCAGGAAACCU | 295 | 543 | CCAGGGCCCCAGGAAACCU | 295 | 565 | AGGUUUCCUGGGGCCCUGG | 495 |
| 561 | UGACAGUUCACACCAAUGU | 296 | 561 | UGACAGUUCACACCAAUGU | 296 | 583 | ACAUUGGUGUGAACUGUCA | 496 |
| 579 | UCUCCGACACUCUGCUGCU | 297 | 579 | UCUCCGACACUCUGCUGCU | 297 | 601 | AGCAGCAGAGUGUCGGAGA | 497 |
| 597 | UGACCUGGAGCAACCCGUA | 298 | 597 | UGACCUGGAGCAACCCGUA | 298 | 619 | UACGGGUUGCUCCAGGUCA | 498 |
| 615 | AUCCCCCUGACAAUUACCU | 299 | 615 | AUCCCCCUGACAAUUACCU | 299 | 637 | AGGUAAUUGUCAGGGGGAU | 499 |
| 633 | UGUAUAAUCAUCUCACCUA | 300 | 633 | UGUAUAAUCAUCUCACCUA | 300 | 655 | UAGGUGAGAUGAUUAUACA | 500 |
| 651 | AUGCAGUCAACAUUUGGAG | 301 | 651 | AUGCAGUCAACAUUUGGAG | 301 | 673 | CUCCAAAUGUUGACUGCAU | 501 |
| 669 | GUGAAAACGACCCGGCAGA | 302 | 669 | GUGAAAACGACCCGGCAGA | 302 | 691 | UCUGCCGGGUCGUUUUCAC | 502 |
| 687 | AUUUCAGAAUCUAUAACGU | 303 | 687 | AUUUCAGAAUCUAUAACGU | 303 | 709 | ACGUUAUAGAUUCUGAAAU | 503 |
| 705 | UGACCUACCUAGAACCCUC | 304 | 705 | UGACCUACCUAGAACCCUC | 304 | 727 | GAGGGUUCUAGGUAGGUCA | 504 |
| 723 | CCCUCCGCAUCGCAGCCAG | 305 | 723 | CCCUCCGCAUCGCAGCCAG | 305 | 745 | CUGGCUGCGAUGCGGAGGG | 505 |
| 741 | GCACCCUGAAGUCUGGGAU | 306 | 741 | GCACCCUGAAGUCUGGGAU | 306 | 763 | AUCCCAGACUUCAGGGUGC | 506 |
| 759 | UUUCCUACAGGGCACGGGU | 307 | 759 | UUUCCUACAGGGCACGGGU | 307 | 781 | ACCCGUGCCCUGUAGGAAA | 507 |
| 777 | UGAGGGCCUGGGCUCAGUG | 308 | 777 | UGAGGGCCUGGGCUCAGUG | 308 | 799 | CACUGAGCCCAGGCCCUCA | 508 |
| 795 | GCUAUAACACCACCUGGAG | 309 | 795 | GCUAUAACACCACCUGGAG | 309 | 817 | CUCCAGGUGGUGUUAUAGC | 509 |
| 813 | GUGAGUGGAGCCCCAGCAC | 310 | 813 | GUGAGUGGAGCCCCAGCAC | 310 | 835 | GUGCUGGGGCUCCACUCAC | 510 |
| 831 | CCAAGUGGCACAACUCCUA | 311 | 831 | CCAAGUGGCACAACUCCUA | 311 | 853 | UAGGAGUUGUGCCACUUGG | 511 |
| 849 | ACAGGGAGCCCUUCGAGCA | 312 | 849 | ACAGGGAGCCCUUCGAGCA | 312 | 871 | UGCUCGAAGGGCUCCCUGU | 512 |
| 867 | AGCACCUCCUGCUGGGCGU | 313 | 867 | AGCACCUCCUGCUGGGCGU | 313 | 889 | ACGCCCAGCAGGAGGUGCU | 513 |
| 885 | UCAGCGUUUCCUGCAUUGU | 314 | 885 | UCAGCGUUUCCUGCAUUGU | 314 | 907 | ACAAUGCAGGAPACGCUGA | 514 |
| 903 | UCAUCCUGGCCGUCUGCCU | 315 | 903 | UCAUCCUGGCCGUCUGCCU | 315 | 925 | AGGCAGACGGCCAGGAUGA | 515 |
| 921 | UGUUGUGCUAUGUCAGCAU | 316 | 921 | UGUUGUGCUAUGUCAGCAU | 316 | 943 | AUGCUGACAUAGCACAACA | 516 |
| 939 | UCACCAAGAUUAAGAAAGA | 317 | 939 | UCACCAAGAUUAAGAAAGA | 317 | 961 | UCUUUCUUAAUCUUGGUGA | 517 |
| 957 | AAUGGUGGGAUCAGAUUCC | 318 | 957 | AAUGGUGGGAUCAGAUUCC | 318 | 979 | GGAAUCUGAUCCCACCAUU | 518 |
| 975 | CCAACCCAGCCCGCAGCCG | 319 | 975 | CCAACCCAGCCCGCAGCCG | 319 | 997 | CGGCUGCGGGCUGGGUUGG | 519 |
| 993 | GCCUCGUGGCUAUAAUAAU | 320 | 993 | GCCUCGUGGCUAUAAUAAU | 320 | 1015 | AUUAUUAUAGCCACGAGGC | 520 |
| 1011 | UCCAGGAUGCUCAGGGGUC | 321 | 1011 | UCCAGGAUGCUCAGGGGUC | 321 | 1033 | GACCCCUGAGCAUCCUGGA | 521 |
| 1029 | CACAGUGGGAGAAGCGGUC | 322 | 1029 | CACAGUGGGAGAAGCGGUC | 322 | 1051 | GACCGCUUCUCCCACUGUG | 522 |
| 1047 | CCCGAGGCCAGGAACCAGC | 323 | 1047 | CCCGAGGCCAGGAACCAGC | 323 | 1069 | GCUGGUUCCUGGCCUCGGG | 523 |
| 1065 | CCAAGUGCCCACACUGGAA | 324 | 1065 | CCAAGUGCCCACACUGGAA | 324 | 1087 | UUCCAGUGUGGGCACUUGG | 524 |
| 1083 | AGAAUUGUCUUACCAAGCU | 325 | 1083 | AGAAUUGUCUUACCAAGCU | 325 | 1105 | AGCUUGGUAAGACAAUUCU | 525 |
| 1101 | UCUUGCCCUGUUUUCUGGA | 326 | 1101 | UCUUGCCCUGUUUUCUGGA | 326 | 1123 | UCCAGAAAACAGGGCAAGA | 526 |
| 1119 | AGCACAACAUGAAAAGGGA | 327 | 1119 | AGCACAACAUGAAAAGGGA | 327 | 1141 | UCCCUUUUCAUGUUGUGCU | 527 |
| 1137 | AUGAAGAUCCUCACAAGGC | 328 | 1137 | AUGAAGAUCCUCACAAGGC | 328 | 1159 | GCCUUGUGAGGAUCUUCAU | 528 |
| 1155 | CUGCCAAAGAGAUGCCUUU | 329 | 1155 | CUGCCAAAGAGAUGCCUUU | 329 | 1177 | AAAGGCAUCUCUUUGGCAG | 529 |
| 1173 | UCCAGGGCUCUGGAAAAUC | 330 | 1173 | UCCAGGGCUCUGGAAAAUC | 330 | 1195 | GAUUUUCCAGAGCCCUGGA | 530 |
| 1191 | CAGCAUGGUGCCCAGUGGA | 331 | 1191 | CAGCAUGGUGCCCAGUGGA | 331 | 1213 | UCCACUGGGCACCAUGCUG | 531 |
| 1209 | AGAUCAGCAAGACAGUCCU | 332 | 1209 | AGAUCAGCAAGACAGUCCU | 332 | 1231 | AGGACUGUCUUGCUGAUCU | 532 |
| 1227 | UCUGGCCAGAGAGCAUCAG | 333 | 1227 | UCUGGCCAGAGAGCAUCAG | 333 | 1249 | CUGAUGCUCUCUGGCCAGA | 533 |
| 1245 | GCGUGGUGCGAUGUGUGGA | 334 | 1245 | GCGUGGUGCGAUGUGUGGA | 334 | 1267 | UCCACACAUCGCACCACGC | 534 |
| 1263 | AGUUGUUUGAGGCCCCGGU | 335 | 1263 | AGUUGUUUGAGGCCCCGGU | 335 | 1285 | ACCGGGGCCUCAAACAACU | 535 |
| 1281 | UGGAGUGUGAGGAGGAGGA | 336 | 1281 | UGGAGUGUGAGGAGGAGGA | 336 | 1303 | UCCUCCUCCUCACACUCCA | 536 |
| 1299 | AGGAGGUAGAGGAAGAAAA | 337 | 1299 | AGGAGGUAGAGGAAGAAAA | 337 | 1321 | UUUUCUUCCUCUACCUCCU | 537 |
| 1317 | AAGGGAGCUUCUGUGCAUC | 338 | 1317 | AAGGGAGCUUCUGUGCAUC | 338 | 1339 | GAUGCACAGAAGCUCCCUU | 538 |
| 1335 | CGCCUGAGAGCAGCAGGGA | 339 | 1335 | CGCCUGAGAGCAGCAGGGA | 339 | 1357 | UCCCUGCUGCUCUCAGGCG | 539 |
| 1353 | AUGACUUCCAGGAGGGAAG | 340 | 1353 | AUGACUUCCAGGAGGGAAG | 340 | 1375 | CUUCCCUCCUGGAAGUCAU | 540 |
| 1371 | GGGAGGGCAUUGUGGCCCG | 341 | 1371 | GGGAGGGCAUUGUGGCCCG | 341 | 1393 | CGGGCCACAAUGCCCUCCC | 541 |
| 1389 | GGCUAACAGAGAGCCUGUU | 342 | 1389 | GGCUAACAGAGAGCCUGUU | 342 | 1411 | AACAGGCUCUCUGUUAGCC | 542 |
| 1407 | UCCUGGACCUGCUCGGAGA | 343 | 1407 | UCCUGGACCUGCUCGGAGA | 343 | 1429 | UCUCCGAGCAGGUCCAGGA | 543 |
| 1425 | AGGAGAAUGGGGGCUUUUG | 344 | 1425 | AGGAGAAUGGGGGCUUUUG | 344 | 1447 | CAAAAGCCCCCAUUCUCCU | 544 |
| 1443 | GCCAGCAGGACAUGGGGGA | 345 | 1443 | GCCAGCAGGACAUGGGGGA | 345 | 1465 | UCCCCCAUGUCCUGCUGGC | 545 |
| 1461 | AGUCAUGCCUUCUUCCACC | 346 | 1461 | AGUCAUGCCUUCUUCCACC | 346 | 1483 | GGUGGAAGAAGGCAUGACU | 546 |
| 1479 | CUUCGGGAAGUACGAGUGC | 347 | 1479 | CUUCGGGAAGUACGAGUGC | 347 | 1501 | GCACUCGUACUUCCCGAAG | 547 |
| 1497 | CUCACAUGCCCUGGGAUGA | 348 | 1497 | CUCACAUGCCCUGGGAUGA | 348 | 1519 | UCAUCCCAGGGCAUGUGAG | 548 |
| 1515 | AGUUCCCAAGUGCAGGGCC | 349 | 1515 | AGUUCCCAAGUGCAGGGCC | 349 | 1537 | GGCCCUGCACUUGGGAACU | 549 |
| 1533 | CCAAGGAGGCACCUCCCUG | 350 | 1533 | CCAAGGAGGCACCUCCCUG | 350 | 1555 | CAGGGAGGUGCCUCCUUGG | 550 |
| 1551 | GGGGCAAGGAGCAGCCUCU | 351 | 1551 | GGGGCAAGGAGCAGCCUCU | 351 | 1573 | AGAGGCUGCUCCUUGCCCC | 551 |
| 1569 | UCCACCUGGAGCCAAGUCC | 352 | 1569 | UCCACCUGGAGCCAAGUCC | 352 | 1591 | GGACUUGGCUCCAGGUGGA | 552 |
| 1587 | CUCCUGCCAGCCCGACCCA | 353 | 1587 | CUCCUGCCAGCCCGACCCA | 353 | 1609 | UGGGUCGGGCUGGCAGGAG | 553 |
| 1605 | AGAGUCCAGACAACCUGAC | 354 | 1605 | AGAGUCCAGACAACCUGAC | 354 | 1627 | GUCAGGUUGUCUGGACUCU | 554 |
| 1623 | CUUGCACAGAGACGCCCCU | 355 | 1623 | CUUGCACAGAGACGCCCCU | 355 | 1645 | AGGGGCGUCUCUGUGCAAG | 555 |
| 1641 | UCGUCAUCGCAGGCAACCC | 356 | 1641 | UCGUCAUCGCAGGCAACCC | 356 | 1663 | GGGUUGCCUGCGAUGACGA | 556 |
| 1659 | CUGCUUACCGCAGCUUCAG | 357 | 1659 | CUGCUUACCGCAGCUUCAG | 357 | 1681 | CUGAAGCUGCGGUAAGCAG | 557 |
| 1677 | GCAACUCCCUGAGCCAGUC | 358 | 1677 | GCAACUCCCUGAGCCAGUC | 358 | 1699 | GACUGGCUCAGGGAGUUGC | 558 |
| 1695 | CACCGUGUCCCAGAGAGCU | 359 | 1695 | CACCGUGUCCCAGAGAGCU | 359 | 1717 | AGCUCUCUGGGACACGGUG | 559 |
| 1713 | UGGGUCCAGACCCACUGCU | 360 | 1713 | UGGGUCCAGACCCACUGCU | 360 | 1735 | AGCAGUGGGUCUGGACCCA | 560 |
| 1731 | UGGCCAGACACCUGGAGGA | 361 | 1731 | UGGCCAGACACCUGGAGGA | 361 | 1753 | UCCUCCAGGUGUCUGGCCA | 561 |
| 1749 | AAGUAGAACCCGAGAUGCC | 362 | 1749 | AAGUAGAACCCGAGAUGCC | 362 | 1771 | GGCAUCUCGGGUUCUACUU | 562 |
| 1767 | CCUGUGUCCCCCAGCUCUC | 363 | 1767 | CCUGUGUCCCCCAGCUCUC | 363 | 1789 | GAGAGCUGGGGGACACAGG | 563 |
| 1785 | CUGAGCCAACCACUGUGCC | 364 | 1785 | CUGAGCCAACCACUGUGCC | 364 | 1807 | GGCACAGUGGUUGGCUCAG | 564 |
| 1803 | CCCAACCUGAGCCAGAAAC | 365 | 1803 | CCCAACCUGAGCCAGAAAC | 365 | 1825 | GUUUCUGGCUCAGGUUGGG | 565 |
| 1821 | CCUGGGAGCAGAUCCUCCG | 366 | 1821 | CCUGGGAGCAGAUCCUCCG | 366 | 1843 | CGGAGGAUCUGCUCCCAGG | 566 |
| 1839 | GCCGAAAUGUCCUCCAGCA | 367 | 1839 | GCCGAAAUGUCCUCCAGCA | 367 | 1861 | UGCUGGAGGACAUUUCGGC | 567 |
| 1857 | AUGGGGCAGCUGCAGCCCC | 368 | 1857 | AUGGGGCAGCUGCAGCCCC | 368 | 1879 | GGGGCUGCAGCUGCCCCAU | 568 |
| 1875 | CCGUCUCGGCCCCCACCAG | 369 | 1875 | CCGUCUCGGCCCCCACCAG | 369 | 1897 | CUGGUGGGGGCCGAGACGG | 569 |
| 1893 | GUGGCUAUCAGGAGUUUGU | 370 | 1893 | GUGGCUAUCAGGAGUUUGU | 370 | 1915 | ACAAACUCCUGAUAGCCAC | 570 |
| 1911 | UACAUGCGGUGGAGCAGGG | 371 | 1911 | UACAUGCGGUGGAGCAGGG | 371 | 1933 | CCCUGCUCCACCGCAUGUA | 571 |
| 1929 | GUGGCACCCAGGCCAGUGC | 372 | 1929 | GUGGCACCCAGGCCAGUGC | 372 | 1951 | GCACUGGCCUGGGUGCCAC | 572 |
| 1947 | CGGUGGUGGGCUUGGGUCC | 373 | 1947 | CGGUGGUGGGCUUGGGUCC | 373 | 1969 | GGACCCAAGCCCACCACCG | 573 |
| 1965 | CCCCAGGAGAGGCUGGUUA | 374 | 1965 | CCCCAGGAGAGGCUGGUUA | 374 | 1987 | UAACCAGCCUCUCCUGGGG | 574 |
| 1983 | ACAAGGCCUUCUCAAGCCU | 375 | 1983 | ACAAGGCCUUCUCAAGCCU | 375 | 2005 | AGGCUUGAGAAGGCCUUGU | 575 |
| 2001 | UGCUUGCCAGCAGUGCUGU | 376 | 2001 | UGCUUGCCAGCAGUGCUGU | 376 | 2023 | ACAGCACUGCUGGCAAGCA | 576 |
| 2019 | UGUCCCCAGAGAAAUGUGG | 377 | 2019 | UGUCCCCAGAGAAAUGUGG | 377 | 2041 | CCACAUUUCUCUGGGGACA | 577 |
| 2037 | GGUUUGGGGCUAGCAGUGG | 378 | 2037 | GGUUUGGGGCUAGCAGUGG | 378 | 2059 | CCACUGCUAGCCCCAAACC | 578 |
| 2055 | GGGAAGAGGGGUAUAAGCC | 379 | 2055 | GGGAAGAGGGGUAUAAGCC | 379 | 2077 | GGCUUAUACCCCUCUUCCC | 579 |
| 2073 | CUUUCCAAGACCUCAUUCC | 380 | 2073 | CUUUCCAAGACCUCAUUCC | 380 | 2095 | GGAAUGAGGUCUUGGAAAG | 580 |
| 2091 | CUGGCUGCCCUGGGGACCC | 381 | 2091 | CUGGCUGCCCUGGGGACCC | 381 | 2113 | GGGUCCCCAGGGCAGCCAG | 581 |
| 2109 | CUGCCCCAGUCCCUGUCCC | 382 | 2109 | CUGCCCCAGUCCCUGUCCC | 382 | 2131 | GGGACAGGGACUGGGGCAG | 582 |
| 2127 | CCUUGUUCACCUUUGGACU | 383 | 2127 | CCUUGUUCACCUUUGGACU | 383 | 2149 | AGUCCAAAGGUGAACAAGG | 583 |
| 2145 | UGGACAGGGAGCCACCUCG | 384 | 2145 | UGGACAGGGAGCCACCUCG | 384 | 2167 | CGAGGUGGCUCCCUGUCCA | 584 |
| 2163 | GCAGUCCGCAGAGCUCACA | 385 | 2163 | GCAGUCCGCAGAGCUCACA | 385 | 2185 | UGUGAGCUCUGCGGACUGC | 585 |
| 2181 | AUCUCCCAAGCAGCUCCCC | 386 | 2181 | AUCUCCCAAGCAGCUCCCC | 386 | 2203 | GGGGAGCUGCUUGGGAGAU | 586 |
| 2199 | CAGAGCACCUGGGUCUGGA | 387 | 2199 | CAGAGCACCUGGGUCUGGA | 387 | 2221 | UCCAGACCCAGGUGCUCUG | 587 |
| 2217 | AGCCGGGGGAAAAGGUAGA | 388 | 2217 | AGCCGGGGGAAAAGGUAGA | 388 | 2239 | UCUACCUUUUCCCCCGGCU | 588 |
| 2235 | AGGACAUGCCAAAGCCCCC | 389 | 2235 | AGGACAUGCCAAAGCCCCC | 389 | 2257 | GGGGGCUUUGGCAUGUCCU | 589 |
| 2253 | CACUUCCCCAGGAGCAGGC | 390 | 2253 | CACUUCCCCAGGAGCAGGC | 390 | 2275 | GCCUGCUCCUGGGGAAGUG | 590 |
| 2271 | CCACAGACCCCCUUGUGGA | 391 | 2271 | CCACAGACCCCCUUGUGGA | 391 | 2293 | UCCACAAGGGGGUCUGUGG | 591 |
| 2289 | ACAGCCUGGGCAGUGGCAU | 392 | 2289 | ACAGCCUGGGCAGUGGCAU | 392 | 2311 | AUGCCACUGCCCAGGCUGU | 592 |
| 2307 | UUGUCUACUCAGCCCUUAC | 393 | 2307 | UUGUCUACUCAGCCCUUAC | 393 | 2329 | GUAAGGGCUGAGUAGACAA | 593 |
| 2325 | CCUGCCACCUGUGCGGCCA | 394 | 2325 | CCUGCCACCUGUGCGGCCA | 394 | 2347 | UGGCCGCACAGGUGGCAGG | 594 |
| 2343 | ACCUGAAACAGUGUCAUGG | 395 | 2343 | ACCUGAAACAGUGUCAUGG | 395 | 2365 | CCAUGACACUGUUUCAGGU | 595 |
| 2361 | GCCAGGAGGAUGGUGGCCA | 396 | 2361 | GCCAGGAGGAUGGUGGCCA | 396 | 2383 | UGGCCACCAUCCUCCUGGC | 596 |
| 2379 | AGACCCCUGUCAUGGCCAG | 397 | 2379 | AGACCCCUGUCAUGGCCAG | 397 | 2401 | CUGGCCAUGACAGGGGUCU | 597 |
| 2397 | GUCCUUGCUGUGGCUGCUG | 398 | 2397 | GUCCUUGCUGUGGCUGCUG | 398 | 2419 | CAGCAGCCACAGCAAGGAC | 598 |
| 2415 | GCUGUGGAGACAGGUCCUC | 399 | 2415 | GCUGUGGAGACAGGUCCUC | 399 | 2437 | GAGGACCUGUCUCCACAGC | 599 |
| 2433 | CGCCCCCUACAACCCCCCU | 400 | 2433 | CGCCCCCUACAACCCCCCU | 400 | 2455 | AGGGGGGUUGUAGGGGGCG | 600 |
| 2451 | UGAGGGCCCCAGACCCCUC | 401 | 2451 | UGAGGGCCCCAGACCCCUC | 401 | 2473 | GAGGGGUCUGGGGCCCUCA | 601 |
| 2469 | CUCCAGGUGGGGUUCCACU | 402 | 2469 | CUCCAGGUGGGGUUCCACU | 402 | 2491 | AGUGGAACCCCACCUGGAG | 602 |
| 2487 | UGGAGGCCAGUCUGUGUCC | 403 | 2487 | UGGAGGCCAGUCUGUGUCC | 403 | 2509 | GGACACAGACUGGCCUCCA | 603 |
| 2505 | CGGCCUCCCUGGCACCCUC | 404 | 2505 | CGGCCUCCCUGGCACCCUC | 404 | 2527 | GAGGGUGCCAGGGAGGCCG | 604 |
| 2523 | CGGGCAUCUCAGAGAAGAG | 405 | 2523 | CGGGCAUCUCAGAGAAGAG | 405 | 2545 | CUCUUCUCUGAGAUGCCCG | 605 |
| 2541 | GUAAAUCCUCAUCAUCCUU | 406 | 2541 | GUAAAUCCUCAUCAUCCUU | 406 | 2563 | AAGGAUGAUGAGGAUUUAC | 606 |
| 2559 | UCCAUCCUGCCCCUGGCAA | 407 | 2559 | UCCAUCCUGCCCCUGGCAA | 407 | 2581 | UUGCCAGGGGCAGGAUGGA | 607 |
| 2577 | AUGCUCAGAGCUCAAGCCA | 408 | 2577 | AUGCUCAGAGCUCAAGCCA | 408 | 2599 | UGGCUUGAGCUCUGAGCAU | 608 |
| 2595 | AGACCCCCAAAAUCGUGAA | 409 | 2595 | AGACCCCCAAAAUCGUGAA | 409 | 2617 | UUCACGAUUUUGGGGGUCU | 609 |
| 2613 | ACUUUGUCUCCGUGGGACC | 410 | 2613 | ACUUUGUCUCCGUGGGACC | 410 | 2635 | GGUCCCACGGAGACAAAGU | 610 |
| 2631 | CCACAUACAUGAGGGUCUC | 411 | 2631 | CCACAUACAUGAGGGUCUC | 411 | 2653 | GAGACCCUCAUGUAUGUGG | 611 |
| 2649 | CUUAGGUGCAUGUCCUCUU | 412 | 2649 | CUUAGGUGCAUGUCCUCUU | 412 | 2671 | AAGAGGACAUGCACCUAAG | 612 |
| 2667 | UGUUGCUGAGUCUGCAGAU | 413 | 2667 | UGUUGCUGAGUCUGCAGAU | 413 | 2689 | AUCUGCAGACUCAGCAACA | 613 |
| 2685 | UGAGGACUAGGGCUUAUCC | 414 | 2685 | UGAGGACUAGGGCUUAUCC | 414 | 2707 | GGAUAAGCCCUAGUCCUCA | 614 |
| 2703 | CAUGCCUGGGAAAUGCCAC | 415 | 2703 | CAUGCCUGGGAAAUGCCAC | 415 | 2725 | GUGGCAUUUCCCAGGCAUG | 615 |
| 2721 | CCUCCUGGAAGGCAGCCAG | 416 | 2721 | CCUCCUGGAAGGCAGCCAG | 416 | 2743 | CUGGCUGCCUUCCAGGAGG | 616 |
| 2739 | GGCUGGCAGAUUUCCAAAA | 417 | 2739 | GGCUGGCAGAUUUCCAAAA | 417 | 2761 | UUUUGGAAAUCUGCCAGCC | 617 |
| 2757 | AGACUUGAAGAACCAUGGU | 418 | 2757 | AGACUUGAAGAACCAUGGU | 418 | 2779 | ACCAUGGUUCUUCAAGUCU | 618 |
| 2775 | UAUGAAGGUGAUUGGCCCC | 419 | 2775 | UAUGAAGGUGAUUGGCCCC | 419 | 2797 | GGGGCCAAUCACCUUCAUA | 619 |
| 2793 | CACUGACGUUGGCCUAACA | 420 | 2793 | CACUGACGUUGGCCUAACA | 420 | 2815 | UGUUAGGCCAACGUCAGUG | 620 |
| 2811 | ACUGGGCUGCAGAGACUGG | 421 | 2811 | ACUGGGCUGCAGAGACUGG | 421 | 2833 | CCAGUCUCUGCAGCCCAGU | 621 |
| 2829 | GACCCCGCCCAGCAUUGGG | 422 | 2829 | GACCCCGCCCAGCAUUGGG | 422 | 2851 | CCCAAUGCUGGGCGGGGUC | 622 |
| 2847 | GCUGGGCUCGCCACAUCCC | 423 | 2847 | GCUGGGCUCGCCACAUCCC | 423 | 2869 | GGGAUGUGGCGAGCCCAGC | 623 |
| 2865 | CAUGAGAGUAGAGGGCACU | 424 | 2865 | CAUGAGAGUAGAGGGCACU | 424 | 2887 | AGUGCCCUCUACUCUCAUG | 624 |
| 2883 | UGGGUCGCCGUGCCCCACG | 425 | 2883 | UGGGUCGCCGUGCCCCACG | 425 | 2905 | CGUGGGGCACGGCGACCCA | 625 |
| 2901 | GGCAGGCCCCUGCAGGAAA | 426 | 2901 | GGCAGGCCCCUGCAGGAAA | 426 | 2923 | UUUCCUGCAGGGGCCUGCC | 626 |
| 2919 | AACUGAGGCCCUUGGGCAC | 427 | 2919 | AACUGAGGCCCUUGGGCAC | 427 | 2941 | GUGCCCAAGGGCCUCAGUU | 627 |
| 2937 | CCUCGACUUGUGAACGAGU | 428 | 2937 | CCUCGACUUGUGAACGAGU | 428 | 2959 | ACUCGUUCACAAGUCGAGG | 628 |
| 2955 | UUGUUGGCUGCUCCCUCCA | 429 | 2955 | UUGUUGGCUGCUCCCUCCA | 429 | 2977 | UGGAGGGAGCAGCCAACAA | 629 |
| 2973 | ACAGCUUCUGCAGCAGACU | 430 | 2973 | ACAGCUUCUGCAGCAGACU | 430 | 2995 | AGUCUGCUGCAGAAGCUGU | 630 |
| 2991 | UGUCCCUGUUGUAACUGCC | 431 | 2991 | UGUCCCUGUUGUAACUGCC | 431 | 3013 | GGCAGUUACAACAGGGACA | 631 |
| 3009 | CCAAGGCAUGUUUUGCCCA | 432 | 3009 | CCAAGGCAUGUUUUGCCCA | 432 | 3031 | UGGGCAAAACAUGCCUUGG | 632 |
| 3027 | ACCAGAUCAUGGCCCACGU | 433 | 3027 | ACCAGAUCAUGGCCCACGU | 433 | 3049 | ACGUGGGCCAUGAUCUGGU | 633 |
| 3045 | UGGAGGCCCACCUGCCUCU | 434 | 3045 | UGGAGGCCCACCUGCCUCU | 434 | 3067 | AGAGGCAGGUGGGCCUCCA | 634 |
| 3063 | UGUCUCACUGAACUAGAAG | 435 | 3063 | UGUCUCACUGAACUAGAAG | 435 | 3085 | CUUCUAGUUCAGUGAGACA | 635 |
| 3081 | GCCGAGCCUAGAAACUAAC | 436 | 3081 | GCCGAGCCUAGAAACUAAC | 436 | 3103 | GUUAGUUUCUAGGCUCGGC | 636 |
| 3099 | CACAGCCAUCAAGGGAAUG | 437 | 3099 | CACAGCCAUCAAGGGAAUG | 437 | 3121 | CAUUCCCUUGAUGGCUGUG | 637 |
| 3117 | GACUUGGGCGGCCUUGGGA | 438 | 3117 | GACUUGGGCGGCCUUGGGA | 438 | 3139 | UCCCAAGGCCGCCCAAGUC | 638 |
| 3135 | AAAUCGAUGAGAAAUUGAA | 439 | 3135 | AAAUCGAUGAGAAAUUGAA | 439 | 3157 | UUCAAUUUCUCAUCGAUUU | 639 |
| 3153 | ACUUCAGGGAGGGUGGUCA | 440 | 3153 | ACUUCAGGGAGGGUGGUCA | 440 | 3175 | UGACCACCCUCCCUGAAGU | 640 |
| 3171 | AUUGCCUAGAGGUGCUCAU | 441 | 3171 | AUUGCCUAGAGGUGCUCAU | 441 | 3193 | AUGAGCACCUCUAGGCAAU | 641 |
| 3189 | UUCAUUUAACAGAGCUUCC | 442 | 3189 | UUCAUUUAACAGAGCUUCC | 442 | 3211 | GGAAGCUCUGUUAAAUGAA | 642 |
| 3207 | CUUAGGUUGAUGCUGGAGG | 443 | 3207 | CUUAGGUUGAUGCUGGAGG | 443 | 3229 | CCUCCAGCAUCAACCUAAG | 643 |
| 3225 | GCAGAAUCCCGGCUGUCAA | 444 | 3225 | GCAGAAUCCCGGCUGUCAA | 444 | 3247 | UUGACAGCCGGGAUUCUGC | 644 |
| 3243 | AGGGGUGUUCAGUUAAGGG | 445 | 3243 | AGGGGUGUUCAGUUAAGGG | 445 | 3265 | CCCUUAACUGAACACCCCU | 645 |
| 3261 | GGAGCAACAGAGGACAUGA | 446 | 3261 | GGAGCAACAGAGGACAUGA | 446 | 3283 | UCAUGUCCUCUGUUGCUCC | 646 |
| 3279 | AAAAAUUGCUAUGACUAAA | 447 | 3279 | AAAAAUUGCUAUGACUAAA | 447 | 3301 | UUUAGUCAUAGCAAUUUUU | 647 |
| 3297 | AGCAGGGACAAUUUGCUGC | 448 | 3297 | AGCAGGGACAAUUUGCUGC | 448 | 3319 | GCAGCAAAUUGUCCCUGCU | 648 |
| 3315 | CCAAACACCCAUGCCCAGC | 449 | 3315 | CCAAACACCCAUGCCCAGC | 449 | 3337 | GCUGGGCAUGGGUGUUUGG | 649 |
| 3333 | CUGUAUGGCUGGGGGCUCC | 450 | 3333 | CUGUAUGGCUGGGGGCUCC | 450 | 3355 | GGAGCCCCCAGCCAUACAG | 650 |
| 3351 | CUCGUAUGCAUGGAACCCC | 451 | 3351 | CUCGUAUGCAUGGAACCCC | 451 | 3373 | GGGGUUCCAUGCAUACGAG | 651 |
| 3369 | CCAGAAUAAAUAUGCUCAG | 452 | 3369 | CCAGAAUAAAUAUGCUCAG | 452 | 3391 | CUGAGCAUAUUUAUUCUGG | 652 |
| 3387 | GCCACCCUGUGGGCCGGGC | 453 | 3387 | GCCACCCUGUGGGCCGGGC | 453 | 3409 | GCCCGGCCCACAGGGUGGC | 653 |
| 3405 | CAAUCCAGACAGCAGGCAU | 454 | 3405 | CAAUCCAGACAGCAGGCAU | 454 | 3427 | AUGCCUGCUGUCUGGAUUG | 654 |
| 3423 | UAAGGCACCAGUUACCCUG | 455 | 3423 | UAAGGCACCAGUUACCCUG | 455 | 3445 | CAGGGUAACUGGUGCCUUA | 655 |
| 3441 | GCAUGUUGGCCCAGACCUC | 456 | 3441 | GCAUGUUGGCCCAGACCUC | 456 | 3463 | GAGGUCUGGGCCAACAUGC | 656 |
| 3459 | CAGGUGCUAGGGAAGGCGG | 457 | 3459 | CAGGUGCUAGGGAAGGCGG | 457 | 3481 | CCGCCUUCCCUAGCACCUG | 657 |
| 3477 | GGAACCUUGGGUUGAGUAA | 458 | 3477 | GGAACCUUGGGUUGAGUAA | 458 | 3499 | UUACUCAACCCAAGGUUCC | 658 |
| 3495 | AUGCUCGUCUGUGUGUUUU | 459 | 3495 | AUGCUCGUCUGUGUGUUUU | 459 | 3517 | AAAACACACAGACGAGCAU | 659 |
| 3513 | UAGUUUCAUCACCUGUUAU | 460 | 3513 | UAGUUUCAUCACCUGUUAU | 460 | 3535 | AUAACAGGUGAUGAAACUA | 660 |
| 3531 | UCUGUGUUUGCUGAGGAGA | 461 | 3531 | UCUGUGUUUGCUGAGGAGA | 461 | 3553 | UCUCCUCAGCAAACACAGA | 661 |
| 3549 | AGUGGAACAGAAGGGGUGG | 462 | 3549 | AGUGGAACAGAAGGGGUGG | 462 | 3571 | CCACCCCUUCUGUUCCACU | 662 |
| 3567 | GAGUUUUGUAUAAAUAAAG | 463 | 3567 | GAGUUUUGUAUAAAUAAAG | 463 | 3589 | CUUUAUUUAUACAAAACUC | 663 |
| 3577 | UAAAUAAAGUUUCUUUGUC | 464 | 3577 | UAAAUAAAGUUUCUUUGUC | 464 | 3599 | GACAAAGAAACUUUAUUUA | 664 |

IL13 NM_002188

| | | |
|---|---|---|
| Seq | Seq | Seq |

| | | | | | | | | |
|---|---|---|---|---|---|---|---|---|
| Pos | Seq | ID | UPos | Upper seq | ID | LPos | Lower seq | ID |

| | | | | | | | | |
|---|---|---|---|---|---|---|---|---|
| 3 | GCCACCCAGCCUAUGCAUC | 665 | 3 | GCCACCCAGCCUAUGCAUC | 665 | 25 | GAUGCAUAGGCUGGGUGGC | 736 |
| 21 | CCGCUCCUCAAUCCUCUCC | 666 | 21 | CCGCUCCUCAAUCCUCUCC | 666 | 43 | GGAGAGGAUUGAGGAGCGG | 737 |
| 39 | CUGUUGGCACUGGGCCUCA | 667 | 39 | CUGUUGGCACUGGGCCUCA | 667 | 61 | UGAGGCCCAGUGCCAACAG | 738 |
| 57 | AUGGCGCUUUUGUUGACCA | 668 | 57 | AUGGCGCUUUUGUUGACCA | 668 | 79 | UGGUCAACAAAAGCGCCAU | 739 |
| 75 | ACGGUCAUUGCUCUCACUU | 669 | 75 | ACGGUCAUUGCUCUCACUU | 669 | 97 | AAGUGAGAGCAAUGACCGU | 740 |
| 93 | UGCCUUGGCGGCUUUGCCU | 670 | 93 | UGCCUUGGCGGCUUUGCCU | 670 | 115 | AGGCAAAGCCGCCAAGGCA | 741 |
| 111 | UCCCCAGGCCCUGUGCCUC | 671 | 111 | UCCCCAGGCCCUGUGCCUC | 671 | 133 | GAGGCACAGGGCCUGGGGA | 742 |
| 129 | CCCUCUACAGCCCUCAGGG | 672 | 129 | CCCUCUACAGCCCUCAGGG | 672 | 151 | CCCUGAGGGCUGUAGAGGG | 743 |
| 147 | GAGCUCAUUGAGGAGCUGG | 673 | 147 | GAGCUCAUUGAGGAGCUGG | 673 | 169 | CCAGCUCCUCAAUGAGCUC | 744 |
| 165 | GUCAACAUCACCCAGAACC | 674 | 165 | GUCAACAUCACCCAGAACC | 674 | 187 | GGUUCUGGGUGAUGUUGAC | 745 |
| 183 | CAGAAGGCUCCGCUCUGCA | 675 | 183 | CAGAAGGCUCCGCUCUGCA | 675 | 205 | UGCAGAGCGGAGCCUUCUG | 746 |
| 201 | AAUGGCAGCAUGGUAUGGA | 676 | 201 | AAUGGCAGCAUGGUAUGGA | 676 | 223 | UCCAUACCAUGCUGCCAUU | 747 |
| 219 | AGCAUCAACCUGACAGCUG | 677 | 219 | AGCAUCAACCUGACAGCUG | 677 | 241 | CAGCUGUCAGGUUGAUGCU | 748 |
| 237 | GGCAUGUACUGUGCAGCCC | 678 | 237 | GGCAUGUACUGUGCAGCCC | 678 | 259 | GGGCUGCACAGUACAUGCC | 749 |
| 255 | CUGGAAUCCCUGAUCAACG | 679 | 255 | CUGGAAUCCCUGAUCAACG | 679 | 277 | CGUUGAUCAGGGAUUCCAG | 750 |
| 273 | GUGUCAGGCUGCAGUGCCA | 680 | 273 | GUGUCAGGCUGCAGUGCCA | 680 | 295 | UGGCACUGCAGCCUGACAC | 751 |
| 291 | AUCGAGAAGACCCAGAGGA | 681 | 291 | AUCGAGAAGACCCAGAGGA | 681 | 313 | UCCUCUGGGUCUUCUCGAU | 752 |
| 309 | AUGCUGAGCGGAUUCUGCC | 682 | 309 | AUGCUGAGCGGAUUCUGCC | 682 | 331 | GGCAGAAUCCGCUCAGCAU | 753 |
| 327 | CCGCACAAGGUCUCAGCUG | 683 | 327 | CCGCACAAGGUCUCAGCUG | 683 | 349 | CAGCUGAGACCUUGUGCGG | 754 |
| 345 | GGGCAGUUUUCCAGCUUGC | 684 | 345 | GGGCAGUUUUCCAGCUUGC | 684 | 367 | GCAAGCUGGAAAACUGCCC | 755 |
| 363 | CAUGUCCGAGACACCAAAA | 685 | 363 | CAUGUCCGAGACACCAAAA | 685 | 385 | UUUUGGUGUCUCGGACAUG | 756 |
| 381 | AUCGAGGUGGCCCAGUUUG | 686 | 381 | AUCGAGGUGGCCCAGUUUG | 686 | 403 | CAAACUGGGCCACCUCGAU | 757 |
| 399 | GUAAAGGACCUGCUCUUAC | 687 | 399 | GUAAAGGACCUGCUCUUAC | 687 | 421 | GUAAGAGCAGGUCCUUUAC | 758 |
| 417 | CAUUUAAAGAAACUUUUUC | 688 | 417 | CAUUUAAAGAAACUUUUUC | 688 | 439 | GAAAAAGUUUCUUUAAAUG | 759 |
| 435 | CGCGAGGGACAGUUCAACU | 689 | 435 | CGCGAGGGACAGUUCAACU | 689 | 457 | AGUUGAACUGUCCCUCGCG | 760 |
| 453 | UGAAACUUCGAAAGCAUCA | 690 | 453 | UGAAACUUCGAAAGCAUCA | 690 | 475 | UGAUGCUUUCGAAGUUUCA | 761 |
| 471 | AUUAUUUGCAGAGACAGGA | 691 | 471 | AUUAUUUGCAGAGACAGGA | 691 | 493 | UCCUGUCUCUGCAAAUAAU | 762 |
| 489 | ACCUGACUAUUGAAGUUGC | 692 | 489 | ACCUGACUAUUGAAGUUGC | 692 | 511 | GCAACUUCAAUAGUCAGGU | 763 |
| 507 | CAGAUUCAUUUUUCUUUCU | 693 | 507 | CAGAUUCAUUUUUCUUUCU | 693 | 529 | AGAAAGAAAAAUGAAUCUG | 764 |
| 525 | UGAUGUCAAAAAUGUCUUG | 694 | 525 | UGAUGUCAAAAAUGUCUUG | 694 | 547 | CAAGACAUUUUUGACAUCA | 765 |
| 543 | GGGUAGGCGGGAAGGAGGG | 695 | 543 | GGGUAGGCGGGAAGGAGGG | 695 | 565 | CCCUCCUUCCCGCCUACCC | 766 |
| 561 | GUUAGGGAGGGGUAAAAUU | 696 | 561 | GUUAGGGAGGGGUAAAAUU | 696 | 583 | AAUUUUACCCCUCCCUAAC | 767 |
| 579 | UCCUUAGCUUAGACCUCAG | 697 | 579 | UCCUUAGCUUAGACCUCAG | 697 | 601 | CUGAGGUCUAAGCUAAGGA | 768 |
| 597 | GCCUGUGCUGCCCGUCUUC | 698 | 597 | GCCUGUGCUGCCCGUCUUC | 698 | 619 | GAAGACGGGCAGCACAGGC | 769 |
| 615 | CAGCCUAGCCGACCUCAGC | 699 | 615 | CAGCCUAGCCGACCUCAGC | 699 | 637 | GCUGAGGUCGGCUAGGCUG | 770 |
| 633 | CCUUCCCCUUGCCCAGGGC | 700 | 633 | CCUUCCCCUUGCCCAGGGC | 700 | 655 | GCCCUGGGCAAGGGGAAGG | 771 |
| 651 | CUCAGCCUGGUGGGCCUCC | 701 | 651 | CUCAGCCUGGUGGGCCUCC | 701 | 673 | GGAGGCCCACCAGGCUGAG | 772 |
| 669 | CUCUGUCCAGGGCCCUGAG | 702 | 669 | CUCUGUCCAGGGCCCUGAG | 702 | 691 | CUCAGGGCCCUGGACAGAG | 773 |
| 687 | GCUCGGUGGACCCAGGGAU | 703 | 687 | GCUCGGUGGACCCAGGGAU | 703 | 709 | AUCCCUGGGUCCACCGAGC | 774 |
| 705 | UGACAUGUCCCUACACCCC | 704 | 705 | UGACAUGUCCCUACACCCC | 704 | 727 | GGGGUGUAGGGACAUGUCA | 775 |
| 723 | CUCCCCUGCCCUAGAGCAC | 705 | 723 | CUCCCCUGCCCUAGAGCAC | 705 | 745 | GUGCUCUAGGGCAGGGGAG | 776 |
| 741 | CACUGUAGCAUUACAGUGG | 706 | 741 | CACUGUAGCAUUACAGUGG | 706 | 763 | CCACUGUAAUGCUACAGUG | 777 |
| 759 | GGUGCCCCCCUUGCCAGAC | 707 | 759 | GGUGCCCCCCUUGCCAGAC | 707 | 781 | GUCUGGCAAGGGGGGCACC | 778 |
| 777 | CAUGUGGUGGGACAGGGAC | 708 | 777 | CAUGUGGUGGGACAGGGAC | 708 | 799 | GUCCCUGUCCCACCACAUG | 779 |
| 795 | CCCACUUCACACACAGGCA | 709 | 795 | CCCACUUCACACACAGGCA | 709 | 817 | UGCCUGUGUGUGAAGUGGG | 780 |
| 813 | AACUGAGGCAGACAGCAGC | 710 | 813 | AACUGAGGCAGACAGCAGC | 710 | 835 | GCUGCUGUCUGCCUCAGUU | 781 |
| 831 | CUCAGGCACACUUCUUCUU | 711 | 831 | CUCAGGCACACUUCUUCUU | 711 | 853 | AAGAAGAAGUGUGCCUGAG | 782 |
| 849 | UGGUCUUAUUUAUUAUUGU | 712 | 849 | UGGUCUUAUUUAUUAUUGU | 712 | 871 | ACAAUAAUAAAUAAGACCA | 783 |
| 867 | UGUGUUAUUUAAAUGAGUG | 713 | 867 | UGUGUUAUUUAAAUGAGUG | 713 | 889 | CACUCAUUUAAAUAACACA | 784 |
| 885 | GUGUUUGUCACCGUUGGGG | 714 | 885 | GUGUUUGUCACCGUUGGGG | 714 | 907 | CCCCAACGGUGACAAACAC | 785 |
| 903 | GAUUGGGGAAGACUGUGGC | 715 | 903 | GAUUGGGGAAGACUGUGGC | 715 | 925 | GCCACAGUCUUCCCCAAUC | 786 |
| 921 | CUGCUAGCACUUGGAGCCA | 716 | 921 | CUGCUAGCACUUGGAGCCA | 716 | 943 | UGGCUCCAAGUGCUAGCAG | 787 |
| 939 | AAGGGUUCAGAGACUCAGG | 717 | 939 | AAGGGUUCAGAGACUCAGG | 717 | 961 | CCUGAGUCUCUGAACCCUU | 788 |
| 957 | GGCCCCAGCACUAAAGCAG | 718 | 957 | GGCCCCAGCACUAAAGCAG | 718 | 979 | CUGCUUUAGUGCUGGGGCC | 789 |
| 975 | GUGGACACCAGGAGUCCCU | 719 | 975 | GUGGACACCAGGAGUCCCU | 719 | 997 | AGGGACUCCUGGUGUCCAC | 790 |
| 993 | UGGUAAUAAGUACUGUGUA | 720 | 993 | UGGUAAUAAGUACUGUGUA | 720 | 1015 | UACACAGUACUUAUUACCA | 791 |
| 1011 | ACAGAAUUCUGCUACCUCA | 721 | 1011 | ACAGAAUUCUGCUACCUCA | 721 | 1033 | UGAGGUAGCAGAAUUCUGU | 792 |
| 1029 | ACUGGGGUCCUGGGGCCUC | 722 | 1029 | ACUGGGGUCCUGGGGCCUC | 722 | 1051 | GAGGCCCCAGGACCCCAGU | 793 |
| 1047 | CGGAGCCUCAUCCGAGGCA | 723 | 1047 | CGGAGCCUCAUCCGAGGCA | 723 | 1069 | UGCCUCGGAUGAGGCUCCG | 794 |
| 1065 | AGGGUCAGGAGAGGGGCAG | 724 | 1065 | AGGGUCAGGAGAGGGGCAG | 724 | 1087 | CUGCCCCUCUCCUGACCCU | 795 |
| 1083 | GAACAGCCGCUCCUGUCUG | 725 | 1083 | GAACAGCCGCUCCUGUCUG | 725 | 1105 | CAGACAGGAGCGGCUGUUC | 796 |
| 1101 | GCCAGCCAGCAGCCAGCUC | 726 | 1101 | GCCAGCCAGCAGCCAGCUC | 726 | 1123 | GAGCUGGCUGCUGGCUGGC | 797 |
| 1119 | CUCAGCCAACGAGUAAUUU | 727 | 1119 | CUCAGCCAACGAGUAAUUU | 727 | 1141 | AAAUUACUCGUUGGCUGAG | 798 |
| 1137 | UAUUGUUUUUCCUUGUAUU | 728 | 1137 | UAUUGUUUUUCCUUGUAUU | 728 | 1159 | AAUACAAGGAAAAACAAUA | 799 |
| 1155 | UUAAAUAUUAAAUAUGUUA | 729 | 1155 | UUAAAUAUUAAAUAUGUUA | 729 | 1177 | UAACAUAUUUAAUAUUUAA | 800 |
| 1173 | AGCAAAGAGUUAAUAUAUA | 730 | 1173 | AGCAAAGAGUUAAUAUAUA | 730 | 1195 | UAUAUAUUAACUCUUUGCU | 801 |
| 1191 | AGAAGGGUACCUUGAACAC | 731 | 1191 | AGAAGGGUACCUUGAACAC | 731 | 1213 | GUGUUCAAGGUACCCUUCU | 802 |
| 1209 | CUGGGGGAGGGGACAUUGA | 732 | 1209 | CUGGGGGAGGGGACAUUGA | 732 | 1231 | UCAAUGUCCCCUCCCCCAG | 803 |
| 1227 | AACAAGUUGUUUCAUUGAC | 733 | 1227 | AACAAGUUGUUUCAUUGAC | 733 | 1249 | GUCAAUGAAACAACUUGUU | 804 |
| 1245 | CUAUCAAACUGAAGCCAGA | 734 | 1245 | CUAUCAAACUGAAGCCAGA | 734 | 1267 | UCUGGCUUCAGUUUGAUAG | 805 |
| 1262 | GAAAUAAAGUUGGUGACAG | 735 | 1262 | GAAAUAAAGUUGGUGACAG | 735 | 1284 | CUGUCACCAACUUUAUUUC | 806 |

IL13RA1 NM_001560

| | | |
|---|---|---|
| Seq | Seq | Seq |

| | | | | | | | | |
|---|---|---|---|---|---|---|---|---|
| Pos | Seq | ID | UPos | Upper seq | ID | LPos | Lower seq | ID |

| | | | | | | | | |
|---|---|---|---|---|---|---|---|---|
| 3 | CCAAGGCUCCAGCCCGGCC | 807 | 3 | CCAAGGCUCCAGCCCGGCC | 807 | 25 | GGCCGGGCUGGAGCCUUGG | 1030 |
| 21 | CGGGCUCCGAGGCGAGAGG | 808 | 21 | CGGGCUCCGAGGCGAGAGG | 808 | 43 | CCUCUCGCCUCGGAGCCCG | 1031 |
| 39 | GCUGCAUGGAGUGGCCGGC | 809 | 39 | GCUGCAUGGAGUGGCCGGC | 809 | 61 | GCCGGCCACUCCAUGCAGC | 1032 |
| 57 | CGCGGCUCUGCGGGCUGUG | 810 | 57 | CGCGGCUCUGCGGGCUGUG | 810 | 79 | CACAGCCCGCAGAGCCGCG | 1033 |
| 75 | GGGCGCUGCUGCUCUGCGC | 811 | 75 | GGGCGCUGCUGCUCUGCGC | 811 | 97 | GCGCAGAGCAGCAGCGCCC | 1034 |
| 93 | CCGGCGGCGGGGGCGGGGG | 812 | 93 | CCGGCGGCGGGGGCGGGGG | 812 | 115 | CCCCCGCCCCCGCCGCCGG | 1035 |
| 111 | GCGGGGGCGCCGCGCCUAC | 813 | 111 | GCGGGGGCGCCGCGCCUAC | 813 | 133 | GUAGGCGCGGCGCCCCCGC | 1036 |
| 129 | CGGAAACUCAGCCACCUGU | 814 | 129 | CGGAAACUCAGCCACCUGU | 814 | 151 | ACAGGUGGCUGAGUUUCCG | 1037 |
| 147 | UGACAAAUUUGAGUGUCUC | 815 | 147 | UGACAAAUUUGAGUGUCUC | 815 | 169 | GAGACACUCAAAUUUGUCA | 1038 |
| 165 | CUGUUGAAAACCUCUGCAC | 816 | 165 | CUGUUGAAAACCUCUGCAC | 816 | 187 | GUGCAGAGGUUUUCAACAG | 1039 |
| 183 | CAGUAAUAUGGACAUGGAA | 817 | 183 | CAGUAAUAUGGACAUGGAA | 817 | 205 | UUCCAUGUCCAUAUUACUG | 1040 |
| 201 | AUCCACCCGAGGGAGCCAG | 818 | 201 | AUCCACCCGAGGGAGCCAG | 818 | 223 | CUGGCUCCCUCGGGUGGAU | 1041 |
| 219 | GCUCAAAUUGUAGUCUAUG | 819 | 219 | GCUCAAAUUGUAGUCUAUG | 819 | 241 | CAUAGACUACAAUUUGAGC | 1042 |
| 237 | GGUAUUUUAGUCAUUUUGG | 820 | 237 | GGUAUUUUAGUCAUUUUGG | 820 | 259 | CCAAAAUGACUAAAAUACC | 1043 |
| 255 | GCGACAAACAAGAUAAGAA | 821 | 255 | GCGACAAACAAGAUAAGAA | 821 | 277 | UUCUUAUCUUGUUUGUCGC | 1044 |
| 273 | AAAUAGCUCCGGAAACUCG | 822 | 273 | AAAUAGCUCCGGAAACUCG | 822 | 295 | CGAGUUUCCGGAGCUAUUU | 1045 |
| 291 | GUCGUUCAAUAGAAGUACC | 823 | 291 | GUCGUUCAAUAGAAGUACC | 823 | 313 | GGUACUUCUAUUGAACGAC | 1046 |
| 309 | CCCUGAAUGAGAGGAUUUG | 824 | 309 | CCCUGAAUGAGAGGAUUUG | 824 | 331 | CAAAUCCUCUCAUUCAGGG | 1047 |
| 327 | GUCUGCAAGUGGGGUCCCA | 825 | 327 | GUCUGCAAGUGGGGUCCCA | 825 | 349 | UGGGACCCCACUUGCAGAC | 1048 |
| 345 | AGUGUAGCACCAAUGAGAG | 826 | 345 | AGUGUAGCACCAAUGAGAG | 826 | 367 | CUCUCAUUGGUGCUACACU | 1049 |
| 363 | GUGAGAAGCCUAGCAUUUU | 827 | 363 | GUGAGAAGCCUAGCAUUUU | 827 | 385 | AAAAUGCUAGGCUUCUCAC | 1050 |
| 381 | UGGUUGPAAAAUGCAUCUC | 828 | 381 | UGGUUGAAAAAUGCAUCUC | 828 | 403 | GAGAUGCAUUUUUCAACCA | 1051 |
| 399 | CACCCCCAGAAGGUGAUCC | 829 | 399 | CACCCCCAGAAGGUGAUCC | 829 | 421 | GGAUCACCUUCUGGGGGUG | 1052 |
| 417 | CUGAGUCUGCUGUGACUGA | 830 | 417 | CUGAGUCUGCUGUGACUGA | 830 | 439 | UCAGUCACAGCAGACUCAG | 1053 |
| 435 | AGCUUCAAUGCAUUUGGCA | 831 | 435 | AGCUUCAAUGCAUUUGGCA | 831 | 457 | UGCCAAAUGCAUUGAAGCU | 1054 |
| 453 | ACAACCUGAGCUACAUGAA | 832 | 453 | ACAACCUGAGCUACAUGAA | 832 | 475 | UUCAUGUAGCUCAGGUUGU | 1055 |
| 471 | AGUGUUCUUGGCUCCCUGG | 833 | 471 | AGUGUUCUUGGCUCCCUGG | 833 | 493 | CCAGGGAGCCAAGAACACU | 1056 |
| 489 | GAAGGAAUACCAGUCCCGA | 834 | 489 | GAAGGAAUACCAGUCCCGA | 834 | 511 | UCGGGACUGGUAUUCCUUC | 1057 |
| 507 | ACACUAACUAUACUCUCUA | 835 | 507 | ACACUAACUAUACUCUCUA | 835 | 529 | UAGAGAGUAUAGUUAGUGU | 1058 |
| 525 | ACUAUUGGCACAGAAGCCU | 836 | 525 | ACUAUUGGCACAGAAGCCU | 836 | 547 | AGGCUUCUGUGCCAAUAGU | 1059 |
| 543 | UGGAAAAAAUUCAUCAAUG | 837 | 543 | UGGAAAAAAUUCAUCAAUG | 837 | 565 | CAUUGAUGAAUUUUUUCCA | 1060 |
| 561 | GUGAAAACAUCUUUAGAGA | 838 | 561 | GUGAAAACAUCUUUAGAGA | 838 | 583 | UCUCUAAAGAUGUUUUCAC | 1061 |
| 579 | AAGGCCAAUACUUUGGUUG | 839 | 579 | AAGGCCAAUACUUUGGUUG | 839 | 601 | CAACCAAAGUAUUGGCCUU | 1062 |
| 597 | GUUCCUUUGAUCUGACCAA | 840 | 597 | GUUCCUUUGAUCUGACCAA | 840 | 619 | UUGGUCAGAUCAAAGGAAC | 1063 |
| 615 | AAGUGAAGGAUUCCAGUUU | 841 | 615 | AAGUGAAGGAUUCCAGUUU | 841 | 637 | AAACUGGAAUCCUUCACUU | 1064 |
| 633 | UUGAACAACACAGUGUCCA | 842 | 633 | UUGAACAACACAGUGUCCA | 842 | 655 | UGGACACUGUGUUGUUCAA | 1065 |
| 651 | AAAUAAUGGUCAAGGAUAA | 843 | 651 | AAAUAAUGGUCAAGGAUAA | 843 | 673 | UUAUCCUUGACCAUUAUUU | 1066 |
| 669 | AUGCAGGAAAAAUUAAACC | 844 | 669 | AUGCAGGAAAAAUUAAACC | 844 | 691 | GGUUUAAUUUUUCCUGCAU | 1067 |
| 687 | CAUCCUUCAAUAUAGUGCC | 845 | 687 | CAUCCUUCAAUAUAGUGCC | 845 | 709 | GGCACUAUAUUGAAGGAUG | 1068 |
| 705 | CUUUAACUUCCCGUGUGAA | 846 | 705 | CUUUAACUUCCCGUGUGAA | 846 | 727 | UUCACACGGGAAGUUAAAG | 1069 |
| 723 | AACCUGAUCCUCCACAUAU | 847 | 723 | AACCUGAUCCUCCACAUAU | 847 | 745 | AUAUGUGGAGGAUCAGGUU | 1070 |
| 741 | UUAAAAACCUCUCCUUCCA | 848 | 741 | UUAAAAACCUCUCCUUCCA | 848 | 763 | UGGAAGGAGAGGUUUUUAA | 1071 |
| 759 | ACAAUGAUGACCUAUAUGU | 849 | 759 | ACAAUGAUGACCUAUAUGU | 849 | 781 | ACAUAUAGGUCAUCAUUGU | 1072 |
| 777 | UGCAAUGGGAGAAUCCACA | 850 | 777 | UGCAAUGGGAGAAUCCACA | 850 | 799 | UGUGGAUUCUCCCAUUGCA | 1073 |
| 795 | AGAAUUUUAUUAGCAGAUG | 851 | 795 | AGAAUUUUAUUAGCAGAUG | 851 | 817 | CAUCUGCUAAUAAAAUUCU | 1074 |
| 813 | GCCUAUUUUAUGAAGUAGA | 852 | 813 | GCCUAUUUUAUGAAGUAGA | 852 | 835 | UCUACUUCAUAAAAUAGGC | 1075 |
| 831 | AAGUCAAUAACAGCCAAAC | 853 | 831 | AAGUCAAUAACAGCCAAAC | 853 | 853 | GUUUGGCUGUUAUUGACUU | 1076 |
| 849 | CUGAGACACAUAAUGUUUU | 854 | 849 | CUGAGACACAUAAUGUUUU | 854 | 871 | AAAACAUUAUGUGUCUCAG | 1077 |
| 867 | UCUACGUCCAAGAGGCUAA | 855 | 867 | UCUACGUCCAAGAGGCUAA | 855 | 889 | UUAGCCUCUUGGACGUAGA | 1078 |
| 885 | AAUGUGAGAAUCCAGAAUU | 856 | 885 | AAUGUGAGAAUCCAGAAUU | 856 | 907 | AAUUCUGGAUUCUCACAUU | 1079 |
| 903 | UUGAGAGAAAUGUGGAGAA | 857 | 903 | UUGAGAGAAAUGUGGAGAA | 857 | 925 | UUCUCCACAUUUCUCUCAA | 1080 |
| 921 | AUACAUCUUGUUUCAUGGU | 858 | 921 | AUACAUCUUGUUUCAUGGU | 858 | 943 | ACCAUGAAACAAGAUGUAU | 1081 |
| 939 | UCCCUGGUGUUCUUCCUGA | 859 | 939 | UCCCUGGUGUUCUUCCUGA | 859 | 961 | UCAGGAAGAACACCAGGGA | 1082 |
| 957 | AUACUUUGAACACAGUCAG | 860 | 957 | AUACUUUGAACACAGUCAG | 860 | 979 | CUGACUGUGUUCAAAGUAU | 1083 |
| 975 | GAAUAAGAGUCAAAACAAA | 861 | 975 | GAAUAAGAGUCAAAACAAA | 861 | 997 | UUUGUUUUGACUCUUAUUC | 1084 |
| 993 | AUAAGUUAUGCUAUGAGGA | 862 | 993 | AUAAGUUAUGCUAUGAGGA | 862 | 1015 | UCCUCAUAGCAUAACUUAU | 1085 |
| 1011 | AUGACAAACUCUGGAGUAA | 863 | 1011 | AUGACAAACUCUGGAGUAA | 863 | 1033 | UUACUCCAGAGUUUGUCAU | 1086 |
| 1029 | AUUGGAGCCAAGAAAUGAG | 864 | 1029 | AUUGGAGCCAAGAAAUGAG | 864 | 1051 | CUCAUUUCUUGGCUCCAAU | 1087 |
| 1047 | GUAUAGGUAAGAAGCGCAA | 865 | 1047 | GUAUAGGUAAGAAGCGCAA | 865 | 1069 | UUGCGCUUCUUACCUAUAC | 1088 |
| 1065 | AUUCCACACUCUACAUAAC | 866 | 1065 | AUUCCACACUCUACAUAAC | 866 | 1087 | GUUAUGUAGAGUGUGGAAU | 1089 |
| 1083 | CCAUGUUACUCAUUGUUCC | 867 | 1083 | CCAUGUUACUCAUUGUUCC | 867 | 1105 | GGAACAAUGAGUAACAUGG | 1090 |
| 1101 | CAGUCAUCGUCGCAGGUGC | 868 | 1101 | CAGUCAUCGUCGCAGGUGC | 868 | 1123 | GCACCUGCGACGAUGACUG | 1091 |
| 1119 | CAAUCAUAGUACUCCUGCU | 869 | 1119 | CAAUCAUAGUACUCCUGCU | 869 | 1141 | AGCAGGAGUACUAUGAUUG | 1092 |
| 1137 | UUUACCUAAAAAGGCUCAA | 870 | 1137 | UUUACCUAAAAAGGCUCAA | 870 | 1159 | UUGAGCCUUUUUAGGUAAA | 1093 |
| 1155 | AGAUUAUUAUAUUCCCUCC | 871 | 1155 | AGAUUAUUAUAUUCCCUCC | 871 | 1177 | GGAGGGAAUAUAAUAAUCU | 1094 |
| 1173 | CAAUUCCUGAUCCUGGCAA | 872 | 1173 | CAAUUCCUGAUCCUGGCAA | 872 | 1195 | UUGCCAGGAUCAGGAAUUG | 1095 |
| 1191 | AGAUUUUUAAAGAAAUGUU | 873 | 1191 | AGAUUUUUAAAGAAAUGUU | 873 | 1213 | AACAUUUCUUUAAAAAUCU | 1096 |
| 1209 | UUGGAGACCAGAAUGAUGA | 874 | 1209 | UUGGAGACCAGAAUGAUGA | 874 | 1231 | UCAUCAUUCUGGUCUCCAA | 1097 |
| 1227 | AUACUCUGCACUGGAAGAA | 875 | 1227 | AUACUCUGCACUGGAAGAA | 875 | 1249 | UUCUUCCAGUGCAGAGUAU | 1098 |
| 1245 | AGUACGACAUCUAUGAGAA | 876 | 1245 | AGUACGACAUCUAUGAGAA | 876 | 1267 | UUCUCAUAGAUGUCGUACU | 1099 |
| 1263 | AGCAAACCAAGGAGGAAAC | 877 | 1263 | AGCAAACCAAGGAGGAAAC | 877 | 1285 | GUUUCCUCCUUGGUUUGCU | 1100 |
| 1281 | CCGACUCUGUAGUGCUGAU | 878 | 1281 | CCGACUCUGUAGUGCUGAU | 878 | 1303 | AUCAGCACUACAGAGUCGG | 1101 |
| 1299 | UAGAAAACCUGAAGAAAGC | 879 | 1299 | UAGAAAACCUGAAGAAAGC | 879 | 1321 | GCUUUCUUCAGGUUUUCUA | 1102 |
| 1317 | CCUCUCAGUGAUGGAGAUA | 880 | 1317 | CCUCUCAGUGAUGGAGAUA | 880 | 1339 | UAUCUCCAUCACUGAGAGG | 1103 |
| 1335 | AAUUUAUUUUUACCUUCAC | 881 | 1335 | AAUUUAUUUUUACCUUCAC | 881 | 1357 | GUGAAGGUAAAAAUAAAUU | 1104 |
| 1353 | CUGUGACCUUGAGAAGAUU | 882 | 1353 | CUGUGACCUUGAGAAGAUU | 882 | 1375 | AAUCUUCUCAAGGUCACAG | 1105 |
| 1371 | UCUUCCCAUUCUCCAUUUG | 883 | 1371 | UCUUCCCAUUCUCCAUUUG | 883 | 1393 | CAAAUGGAGAAUGGGAAGA | 1106 |
| 1389 | GUUAUCUGGGAACUUAUUA | 884 | 1389 | GUUAUCUGGGAACUUAUUA | 884 | 1411 | UAAUAAGUUCCCAGAUAAC | 1107 |
| 1407 | AAAUGGAAACUGAAACUAC | 885 | 1407 | AAAUGGAAACUGAAACUAC | 885 | 1429 | GUAGUUUCAGUUUCCAUUU | 1108 |
| 1425 | CUGCACCAUUUAAAAACAG | 886 | 1425 | CUGCACCAUUUAAAAACAG | 886 | 1447 | CUGUUUUUAAAUGGUGCAG | 1109 |
| 1443 | GGCAGCUCAUAAGAGCCAC | 887 | 1443 | GGCAGCUCAUAAGAGCCAC | 887 | 1465 | GUGGCUCUUAUGAGCUGCC | 1110 |
| 1461 | CAGGUCUUUAUGUUGAGUC | 888 | 1461 | CAGGUCUUUAUGUUGAGUC | 888 | 1483 | GACUCAACAUAAAGACCUG | 1111 |
| 1479 | CGCGCACCGAAAAACUAAA | 889 | 1479 | CGCGCACCGAAAAACUAAA | 889 | 1501 | UUUAGUUUUUCGGUGCGCG | 1112 |
| 1497 | AAAUAAUGGGCGCUUUGGA | 890 | 1497 | AAAUAAUGGGCGCUUUGGA | 890 | 1519 | UCCAAAGCGCCCAUUAUUU | 1113 |
| 1515 | AGAAGAGUGUGGAGUCAUU | 891 | 1515 | AGAAGAGUGUGGAGUCAUU | 891 | 1537 | AAUGACUCCACACUCUUCU | 1114 |
| 1533 | UCUCAUUGAAUUAUAAAAG | 892 | 1533 | UCUCAUUGAAUUAUAAAAG | 892 | 1555 | CUUUUAUAAUUCAAUGAGA | 1115 |
| 1551 | GCCAGCAGGCUUCAAACUA | 893 | 1551 | GCCAGCAGGCUUCAAACUA | 893 | 1573 | UAGUUUGAAGCCUGCUGGC | 1116 |
| 1569 | AGGGGACAAAGCAAAAAGU | 894 | 1569 | AGGGGACAAAGCAAAAAGU | 894 | 1591 | ACUUUUUGCUUUGUCCCCU | 1117 |
| 1587 | UGAUGAUAGUGGUGGAGUU | 895 | 1587 | UGAUGAUAGUGGUGGAGUU | 895 | 1609 | AACUCCACCACUAUCAUCA | 1118 |
| 1605 | UAAUCUUAUCAAGAGUUGU | 896 | 1605 | UAAUCUUAUCAAGAGUUGU | 896 | 1627 | ACAACUCUUGAUAAGAUUA | 1119 |
| 1623 | UGACAACUUCCUGAGGGAU | 897 | 1623 | UGACAACUUCCUGAGGGAU | 897 | 1645 | AUCCCUCAGGAAGUUGUCA | 1120 |
| 1641 | UCUAUACUUGCUUUGUGUU | 898 | 1641 | UCUAUACUUGCUUUGUGUU | 898 | 1663 | AACACAAAGCAAGUAUAGA | 1121 |
| 1659 | UCUUUGUGUCAACAUGAAC | 899 | 1659 | UCUUUGUGUCAACAUGAAC | 899 | 1681 | GUUCAUGUUGACACAAAGA | 1122 |
| 1677 | CAAAUUUUAUUUGUAGGGG | 900 | 1677 | CAAAUUUUAUUUGUAGGGG | 900 | 1699 | CCCCUACAAAUAAAAUUUG | 1123 |
| 1695 | GAACUCAUUUGGGGUGCAA | 901 | 1695 | GAACUCAUUUGGGGUGCAA | 901 | 1717 | UUGCACCCCAAAUGAGUUC | 1124 |
| 1713 | AAUGCUAAUGUCAAACUUG | 902 | 1713 | AAUGCUAAUGUCAAACUUG | 902 | 1735 | CAAGUUUGACAUUAGCAUU | 1125 |
| 1731 | GAGUCACAAAGAACAUGUA | 903 | 1731 | GAGUCACAAAGAACAUGUA | 903 | 1753 | UACAUGUUCUUUGUGACUC | 1126 |
| 1749 | AGAAAACAAAAUGGAUAAA | 904 | 1749 | AGAAAACAAAAUGGAUAAA | 904 | 1771 | UUUAUCCAUUUUGUUUUCU | 1127 |
| 1767 | AAUCUGAUAUGUAUUGUUU | 905 | 1767 | AAUCUGAUAUGUAUUGUUU | 905 | 1789 | AAACAAUACAUAUCAGAUU | 1128 |
| 1785 | UGGGAUCCUAUUGAACCAU | 906 | 1785 | UGGGAUCCUAUUGAACCAU | 906 | 1807 | AUGGUUCAAUAGGAUCCCA | 1129 |
| 1803 | UGUUUGUGGCUAUUAAAAC | 907 | 1803 | UGUUUGUGGCUAUUAAAAC | 907 | 1825 | GUUUUAAUAGCCACAAACA | 1130 |
| 1821 | CUCUUUUAACAGUCUGGGC | 908 | 1821 | CUCUUUUAACAGUCUGGGC | 908 | 1843 | GCCCAGACUGUUAAAAGAG | 1131 |
| 1839 | CUGGGUCCGGUGGCUCACG | 909 | 1839 | CUGGGUCCGGUGGCUCACG | 909 | 1861 | CGUGAGCCACCGGACCCAG | 1132 |
| 1857 | GCCUGUAAUCCCAGCAAUU | 910 | 1857 | GCCUGUAAUCCCAGCAAUU | 910 | 1879 | AAUUGCUGGGAUUACAGGC | 1133 |
| 1875 | UUGGGAGUCCGAGGCGGGC | 911 | 1875 | UUGGGAGUCCGAGGCGGGC | 911 | 1897 | GCCCGCCUCGGACUCCCAA | 1134 |
| 1893 | CGGAUCACUCGAGGUCAGG | 912 | 1893 | CGGAUCACUCGAGGUCAGG | 912 | 1915 | CCUGACCUCGAGUGAUCCG | 1135 |
| 1911 | GAGUUCCAGACCAGCCUGA | 913 | 1911 | GAGUUCCAGACCAGCCUGA | 913 | 1933 | UCAGGCUGGUCUGGAACUC | 1136 |
| 1929 | ACCAAAAUGGUGAAACCUC | 914 | 1929 | ACCAAAAUGGUGAAACCUC | 914 | 1951 | GAGGUUUCACCAUUUUGGU | 1137 |
| 1947 | CCUCUCUACUAAAACUACA | 915 | 1947 | CCUCUCUACUAAAACUACA | 915 | 1969 | UGUAGUUUUAGUAGAGAGG | 1138 |
| 1965 | AAAAAUUAACUGGGUGUGG | 916 | 1965 | AAAAAUUAACUGGGUGUGG | 916 | 1987 | CCACACCCAGUUAAUUUUU | 1139 |
| 1983 | GUGGCGCGUGCCUGUAAUC | 917 | 1983 | GUGGCGCGUGCCUGUAAUC | 917 | 2005 | GAUUACAGGCACGCGCCAC | 1140 |
| 2001 | CCCAGCUACUCGGGAAGCU | 918 | 2001 | CCCAGCUACUCGGGAAGCU | 918 | 2023 | AGCUUCCCGAGUAGCUGGG | 1141 |
| 2019 | UGAGGCAGGUGAAUUGUUU | 919 | 2019 | UGAGGCAGGUGAAUUGUUU | 919 | 2041 | AAACAAUUCACCUGCCUCA | 1142 |
| 2037 | UGAACCUGGGAGGUGGAGG | 920 | 2037 | UGAACCUGGGAGGUGGAGG | 920 | 2059 | CCUCCACCUCCCAGGUUCA | 1143 |
| 2055 | GUUGCAGUGAGCAGAGAUC | 921 | 2055 | GUUGCAGUGAGCAGAGAUC | 921 | 2077 | GAUCUCUGCUCACUGCAAC | 1144 |
| 2073 | CACACCACUGCACUCUAGC | 922 | 2073 | CACACCACUGCACUCUAGC | 922 | 2095 | GCUAGAGUGCAGUGGUGUG | 1145 |
| 2091 | CCUGGGUGACAGAGCAAGA | 923 | 2091 | CCUGGGUGACAGAGCAAGA | 923 | 2113 | UCUUGCUCUGUCACCCAGG | 1146 |
| 2109 | ACUCUGUCUAAAAAACAAA | 924 | 2109 | ACUCUGUCUAAAAAACAAA | 924 | 2131 | UUUGUUUUUUAGACAGAGU | 1147 |
| 2127 | AACAAAACAAAACAAAACA | 925 | 2127 | AACAAAACAAAACAAAACA | 925 | 2149 | UGUUUUGUUUUGUUUUGUU | 1148 |
| 2145 | AAAAAAACCUCUUAAUAUU | 926 | 2145 | AAAAAAACCUCUUAAUAUU | 926 | 2167 | AAUAUUAAGAGGUUUUUUU | 1149 |
| 2163 | UCUGGAGUCAUCAUUCCCU | 927 | 2163 | UCUGGAGUCAUCAUUCCCU | 927 | 2185 | AGGGAAUGAUGACUCCAGA | 1150 |
| 2181 | UUCGACAGCAUUUUCCUCU | 928 | 2181 | UUCGACAGCAUUUUCCUCU | 928 | 2203 | AGAGGAAAAUGCUGUCGAA | 1151 |
| 2199 | UGCUUUGAAAGCCCCAGAA | 929 | 2199 | UGCUUUGAAAGCCCCAGAA | 929 | 2221 | UUCUGGGGCUUUCAAAGCA | 1152 |
| 2217 | AAUCAGUGUUGGCCAUGAU | 930 | 2217 | AAUCAGUGUUGGCCAUGAU | 930 | 2239 | AUCAUGGCCAACACUGAUU | 1153 |
| 2235 | UGACAACUACAGAAAAACC | 931 | 2235 | UGACAACUACAGAAAAACC | 931 | 2257 | GGUUUUUCUGUAGUUGUCA | 1154 |
| 2253 | CAGAGGCAGCUUCUUUGCC | 932 | 2253 | CAGAGGCAGCUUCUUUGCC | 932 | 2275 | GGCAAAGAAGCUGCCUCUG | 1155 |
| 2271 | CAAGACCUUUCAAAGCCAU | 933 | 2271 | CAAGACCUUUCAAAGCCAU | 933 | 2293 | AUGGCUUUGAAAGGUCUUG | 1156 |
| 2289 | UUUUAGGCUGUUAGGGGCA | 934 | 2289 | UUUUAGGCUGUUAGGGGCA | 934 | 2311 | UGCCCCUAACAGCCUAAAA | 1157 |
| 2307 | AGUGGAGGUAGAAUGACUC | 935 | 2307 | AGUGGAGGUAGAAUGACUC | 935 | 2329 | GAGUCAUUCUACCUCCACU | 1158 |
| 2325 | CCUUGGGUAUUAGAGUUUC | 936 | 2325 | CCUUGGGUAUUAGAGUUUC | 936 | 2347 | GAAACUCUAAUACCCAAGG | 1159 |
| 2343 | CAACCAUGAAGUCUCUAAC | 937 | 2343 | CAACCAUGAAGUCUCUAAC | 937 | 2365 | GUUAGAGACUUCAUGGUUG | 1160 |
| 2361 | CAAUGUAUUUUCUUCACCU | 938 | 2361 | CAAUGUAUUUUCUUCACCU | 938 | 2383 | AGGUGAAGAAAAUACAUUG | 1161 |
| 2379 | UCUGCUACUCAAGUAGCAU | 939 | 2379 | UCUGCUACUCAAGUAGCAU | 939 | 2401 | AUGCUACUUGAGUAGCAGA | 1162 |
| 2397 | UUUACUGUGUCUUUGGUUU | 940 | 2397 | UUUACUGUGUCUUUGGUUU | 940 | 2419 | AAACCkAAGACACAGUAAA | 1163 |
| 2415 | UGUGCUAGGCCCCCGGGUG | 941 | 2415 | UGUGCUAGGCCCCCGGGUG | 941 | 2437 | CACCCGGGGGCCUAGCACA | 1164 |
| 2433 | GUGAAGCACAGACCCCUUC | 942 | 2433 | GUGAAGCACAGACCCCUUC | 942 | 2455 | GAAGGGGUCUGUGCUUCAC | 1165 |
| 2451 | CCAGGGGUUUACAGUCUAU | 943 | 2451 | CCAGGGGUUUACAGUCUAU | 943 | 2473 | AUAGACUGUAAACCCCUGG | 1166 |
| 2469 | UUUGAGACUCCUCAGUUCU | 944 | 2469 | UUUGAGACUCCUCAGUUCU | 944 | 2491 | AGAACUGAGGAGUCUCAAA | 1167 |
| 2487 | UUGCCACUUUUUUUUUUAA | 945 | 2487 | UUGCCACUUUUUUUUUUAA | 945 | 2509 | UUAAAAAAAAAAGUGGCAA | 1168 |
| 2505 | AUCUCCACCAGUCAUUUUU | 946 | 2505 | AUCUCCACCAGUCAUUUUU | 946 | 2527 | AAAAAUGACUGGUGGAGAU | 1169 |
| 2523 | UCAGACCUUUUAACUCCUC | 947 | 2523 | UCAGACCUUUUAACUCCUC | 947 | 2545 | GAGGAGUUAAAAGGUCUGA | 1170 |
| 2541 | CAAUUCCAACACUGAUUUC | 948 | 2541 | CAAUUCCAACACUGAUUUC | 948 | 2563 | GAAAUCAGUGUUGGAAUUG | 1171 |
| 2559 | CCCCUUUUGCAUUCUCCCU | 949 | 2559 | CCCCUUUUGCAUUCUCCCU | 949 | 2581 | AGGGAGAAUGCAAAAGGGG | 1172 |
| 2577 | UCCUUCCCUUCCUUGUAGC | 950 | 2577 | UCCUUCCCUUCCUUGUAGC | 950 | 2599 | GCUACAAGGAAGGGAAGGA | 1173 |
| 2595 | CCUUUUGACUUUCAUUGGA | 951 | 2595 | CCUUUUGACUUUCAUUGGA | 951 | 2617 | UCCAAUGAAAGUCAAAAGG | 1174 |
| 2613 | AAAUUAGGAUGUAAAUCUG | 952 | 2613 | AAAUUAGGAUGUAAAUCUG | 952 | 2635 | CAGAUUUACAUCCUAAUUU | 1175 |
| 2631 | GCUCAGGAGACCUGGAGGA | 953 | 2631 | GCUCAGGAGACCUGGAGGA | 953 | 2653 | UCCUCCAGGUCUCCUGAGC | 1176 |
| 2649 | AGCAGAGGAUAAUUAGCAU | 954 | 2649 | AGCAGAGGAUAAUUAGCAU | 954 | 2671 | AUGCUAAUUAUCCUCUGCU | 1177 |
| 2667 | UCUCAGGUUAAGUGUGAGU | 955 | 2667 | UCUCAGGUUAAGUGUGAGU | 955 | 2689 | ACUCACACUUAACCUGAGA | 1178 |
| 2685 | UAAUCUGAGAAACAAUGAC | 956 | 2685 | UAAUCUGAGAAACAAUGAC | 956 | 2707 | GUCAUUGUUUCUCAGAUUA | 1179 |
| 2703 | CUAAUUCUUGCAUAUUUUG | 957 | 2703 | CUAAUUCUUGCAUAUUUUG | 957 | 2725 | CAAAAUAUGCAAGAAUUAG | 1180 |
| 2721 | GUAACUUCCAUGUGAGGGU | 958 | 2721 | GUAACUUCCAUGUGAGGGU | 958 | 2743 | ACCCUCACAUGGAAGUUAC | 1181 |
| 2739 | UUUUCAGCAUUGAUAUUUG | 959 | 2739 | UUUUCAGCAUUGAUAUUUG | 959 | 2761 | CAAAUAUCAAUGCUGAAAA | 1182 |
| 2757 | GUGCAUUUUCUAAACAGAG | 960 | 2757 | GUGCAUUUUCUAAACAGAG | 960 | 2779 | CUCUGUUUAGAAAAUGCAC | 1183 |
| 2775 | GAUGAGGUGGUAUCUUCAC | 961 | 2775 | GAUGAGGUGGUAUCUUCAC | 961 | 2797 | GUGAAGAUACCACCUCAUC | 1184 |
| 2793 | CGUAGAACAUUGGUAUUCG | 962 | 2793 | CGUAGAACAUUGGUAUUCG | 962 | 2815 | CGAAUACCAAUGUUCUACG | 1185 |
| 2811 | GCUUGAGAAAAAAAGAAUA | 963 | 2811 | GCUUGAGAAAAAAAGAAUA | 963 | 2833 | UAUUCUUUUUUUCUCAAGC | 1186 |
| 2829 | AGUUGAACCUAUUUCUCUU | 964 | 2829 | AGUUGAACCUAUUUCUCUU | 964 | 2851 | AAGAGAAAUAGGUUCAACU | 1187 |
| 2847 | UUCUUUACAAGAUGGGUCC | 965 | 2847 | UUCUUUACAAGAUGGGUCC | 965 | 2869 | GGACCCAUCUUGUAAAGAA | 1188 |
| 2865 | CAGGAUUCCUCUUUUCUCU | 966 | 2865 | CAGGAUUCCUCUUUUCUCU | 966 | 2887 | AGAGAAAAGAGGAAUCCUG | 1189 |
| 2883 | UGCCAUAAAUGAUUAAUUA | 967 | 2883 | UGCCAUAAAUGAUUAAUUA | 967 | 2905 | UAAUUAAUCAUUUAUGGCA | 1190 |
| 2901 | AAAUAGCUUUUGUGUCUUA | 968 | 2901 | AAAUAGCUUUUGUGUCUUA | 968 | 2923 | UAAGACACAAAAGCUAUUU | 1191 |
| 2919 | ACAUUGGUAGCCAGCCAGC | 969 | 2919 | ACAUUGGUAGCCAGCCAGC | 969 | 2941 | GCUGGCUGGCUACCAAUGU | 1192 |
| 2937 | CCAAGGCUCUGUUUAUGCU | 970 | 2937 | CCAAGGCUCUGUUUAUGCU | 970 | 2959 | AGCAUAAACAGAGCCUUGG | 1193 |
| 2955 | UUUUGGGGGGCAUAUAUUG | 971 | 2955 | UUUUGGGGGGCAUAUAUUG | 971 | 2977 | CAAUAUAUGCCCCCCAAAA | 1194 |
| 2973 | GGGUUCCAUUCUCACCUAU | 972 | 2973 | GGGUUCCAUUCUCACCUAU | 972 | 2995 | AUAGGUGAGAAUGGAACCC | 1195 |
| 2991 | UCCACACAACAUAUCCGUA | 973 | 2991 | UCCACACAACAUAUCCGUA | 973 | 3013 | UACGGAUAUGUUGUGUGGA | 1196 |
| 3009 | AUAUAUCCCCUCUACUCUU | 974 | 3009 | AUAUAUCCCCUCUACUCUU | 974 | 3031 | AAGAGUAGAGGGGAUAUAU | 1197 |
| 3027 | UACUUCCCCCAAAUUUAAA | 975 | 3027 | UACUUCCCCCAAAUUUAAA | 975 | 3049 | UUUAAAUUUGGGGGAAGUA | 1198 |
| 3045 | AGAAGUAUGGGAAAUGAGA | 976 | 3045 | AGAAGUAUGGGAAAUGAGA | 976 | 3067 | UCUCAUUUCCCAUACUUCU | 1199 |
| 3063 | AGGCAUUUCCCCCACCCCA | 977 | 3063 | AGGCAUUUCCCCCACCCCA | 977 | 3085 | UGGGGUGGGGGAAAUGCCU | 1200 |
| 3081 | AUUUCUCUCCUCACACACA | 978 | 3081 | AUUUCUCUCCUCACACACA | 978 | 3103 | UGUGUGUGAGGAGAGAAAU | 1201 |
| 3099 | AGACUCAUAUUACUGGUAG | 979 | 3099 | AGACUCAUAUUACUGGUAG | 979 | 3121 | CUACCAGUAAUAUGAGUCU | 1202 |
| 3117 | GGAACUUGAGAACUUUAUU | 980 | 3117 | GGAACUUGAGAACUUUAUU | 980 | 3139 | AAUAAAGUUCUCAAGUUCC | 1203 |
| 3135 | UUCCAAGUUGUUCAAACAU | 981 | 3135 | UUCCAAGUUGUUCAAACAU | 981 | 3157 | AUGUUUGAACAACUUGGAA | 1204 |
| 3153 | UUUACCAAUCAUAUUAAUA | 982 | 3153 | UUUACCAAUCAUAUUAAUA | 982 | 3175 | UAUUAAUAUGAUUGGUAAA | 1205 |
| 3171 | ACAAUGAUGCUAUUUGCAA | 983 | 3171 | ACAAUGAUGCUAUUUGCAA | 983 | 3193 | UUGCAAAUAGCAUCAUUGU | 1206 |
| 3189 | AUUCCUGCUCCUAGGGGAG | 984 | 3189 | AUUCCUGCUCCUAGGGGAG | 984 | 3211 | CUCCCCUAGGAGCAGGAAU | 1207 |
| 3207 | GGGGAGAUAAGAAACCCUC | 985 | 3207 | GGGGAGAUAAGAAACCCUC | 985 | 3229 | GAGGGUUUCUUAUCUCCCC | 1208 |
| 3225 | CACUCUCUACAGGUUUGGG | 986 | 3225 | CACUCUCUACAGGUUUGGG | 986 | 3247 | CCCAAACCUGUAGAGAGUG | 1209 |
| 3243 | GUACAAGUGGCAACCUGCU | 987 | 3243 | GUACAAGUGGCAACCUGCU | 987 | 3265 | AGCAGGUUGCCACUUGUAC | 1210 |
| 3261 | UUCCAUGGCCGUGUAGAAG | 988 | 3261 | UUCCAUGGCCGUGUAGAAG | 988 | 3283 | CUUCUACACGGCCAUGGAA | 1211 |
| 3279 | GCAUGGUGCCCUGGCUUCU | 989 | 3279 | GCAUGGUGCCCUGGCUUCU | 989 | 3301 | AGAAGCCAGGGCACCAUGC | 1212 |
| 3297 | UCUGAGGAAGCUGGGGUUC | 990 | 3297 | UCUGAGGAAGCUGGGGUUC | 990 | 3319 | GAACCCCAGCUUCCUCAGA | 1213 |
| 3315 | CAUGACAAUGGCAGAUGUA | 991 | 3315 | CAUGACAAUGGCAGAUGUA | 991 | 3337 | UACAUCUGCCAUUGUCAUG | 1214 |
| 3333 | AAAGUUAUUCUUGAAGUCA | 992 | 3333 | AAAGUUAUUCUUGAAGUCA | 992 | 3355 | UGACUUCAAGAAUAACUUU | 1215 |
| 3351 | AGAUUGAGGCUGGGAGACA | 993 | 3351 | AGAUUGAGGCUGGGAGACA | 993 | 3373 | UGUCUCCCAGCCUCAAUCU | 1216 |
| 3369 | AGCCGUAGUAGAUGUUCUA | 994 | 3369 | AGCCGUAGUAGAUGUUCUA | 994 | 3391 | UAGAACAUCUACUACGGCU | 1217 |
| 3387 | ACUUUGUUCUGCUGUUCUC | 995 | 3387 | ACUUUGUUCUGCUGUUCUC | 995 | 3409 | GAGAACAGCAGAACAAAGU | 1218 |
| 3405 | CUAGAAAGAAUAUUUGGUU | 996 | 3405 | CUAGAAAGAAUAUUUGGUU | 996 | 3427 | AACCAAAUAUUCUUUCUAG | 1219 |
| 3423 | UUUCCUGUAUAGGAAUGAG | 997 | 3423 | UUUCCUGUAUAGGAAUGAG | 997 | 3445 | CUCAUUCCUAUACAGGAAA | 1220 |
| 3441 | GAUUAAUUCCUUUCCAGGU | 998 | 3441 | GAUUAAUUCCUUUCCAGGU | 998 | 3463 | ACCUGGAAAGGAAUUAAUC | 1221 |
| 3459 | UAUUUUAUAAUUCUGGGAA | 999 | 3459 | UAUUUUAUAAUUCUGGGAA | 999 | 3481 | UUCCCAGAAUUAUAAAAUA | 1222 |
| 3477 | AGCAAAACCCAUGCCUCCC | 1000 | 3477 | AGCAAAACCCAUGCCUCCC | 1000 | 3499 | GGGAGGCAUGGGUUUUGCU | 1223 |
| 3495 | CCCUAGCCAUUUUUACUGU | 1001 | 3495 | CCCUAGCCAUUUUUACUGU | 1001 | 3517 | ACAGUAAAAAUGGCUAGGG | 1224 |
| 3513 | UUAUCCUAUUUAGAUGGCC | 1002 | 3513 | UUAUCCUAUUUAGAUGGCC | 1002 | 3535 | GGCCAUCUAAAUAGGAUAA | 1225 |
| 3531 | CAUGAAGAGGAUGCUGUGA | 1003 | 3531 | CAUGAAGAGGAUGCUGUGA | 1003 | 3553 | UCACAGCAUCCUCUUCAUG | 1226 |
| 3549 | AAAUUCCCAACAAACAUUG | 1004 | 3549 | AAAUUCCCAACAAACAUUG | 1004 | 3571 | CAAUGUUUGUUGGGAAUUU | 1227 |
| 3567 | GAUGCUGACAGUCAUGCAG | 1005 | 3567 | GAUGCUGACAGUCAUGCAG | 1005 | 3589 | CUGCAUGACUGUCAGCAUC | 1228 |
| 3585 | GUCUGGGAGUGGGGAAGUG | 1006 | 3585 | GUCUGGGAGUGGGGAAGUG | 1006 | 3607 | CACUUCCCCACUCCCAGAC | 1229 |
| 3603 | GAUCUUUUGUUCCCAUCCU | 1007 | 3603 | GAUCUUUUGUUCCCAUCCU | 1007 | 3625 | AGGAUGGGAACAAAAGAUC | 1230 |
| 3621 | UCUUCUUUUAGCAGUAAAA | 1008 | 3621 | UCUUCUUUUAGCAGUAAAA | 1008 | 3643 | UUUUACUGCUAAAAGAAGA | 1231 |
| 3639 | AUAGCUGAGGGAAAAGGGA | 1009 | 3639 | AUAGCUGAGGGAAAAGGGA | 1009 | 3661 | UCCCUUUUCCCUCAGCUAU | 1232 |
| 3657 | AGGGAAAAGGAAGUUAUGG | 1010 | 3657 | AGGGAAAAGGAAGUUAUGG | 1010 | 3679 | CCAUAACUUCCUUUUCCCU | 1233 |
| 3675 | GGAAUACCUGUGGUGGUUG | 1011 | 3675 | GGAAUACCUGUGGUGGUUG | 1011 | 3697 | CAACCACCACAGGUAUUCC | 1234 |
| 3693 | GUGAUCCCUAGGUCUUGGG | 1012 | 3693 | GUGAUCCCUAGGUCUUGGG | 1012 | 3715 | CCCAAGACCUAGGGAUCAC | 1235 |
| 3711 | GAGCUCUUGGAGGUGUCUG | 1013 | 3711 | GAGCUCUUGGAGGUGUCUG | 1013 | 3733 | CAGACACCUCCAAGAGCUC | 1236 |
| 3729 | GUAUCAGUGGAUUUCCCAU | 1014 | 3729 | GUAUCAGUGGAUUUCCCAU | 1014 | 3751 | AUGGGAAAUCCACUGAUAC | 1237 |
| 3747 | UCCCCUGUGGGAAAUUAGU | 1015 | 3747 | UCCCCUGUGGGAAAUUAGU | 1015 | 3769 | ACUAAUUUCCCACAGGGGA | 1238 |
| 3765 | UAGGCUCAUUUACUGUUUU | 1016 | 3765 | UAGGCUCAUUUACUGUUUU | 1016 | 3787 | AAAACAGUAAAUGAGCCUA | 1239 |
| 3783 | UAGGUCUAGCCUAUGUGGA | 1017 | 3783 | UAGGUCUAGCCUAUGUGGA | 1017 | 3805 | UCCACAUAGGCUAGACCUA | 1240 |
| 3801 | AUUUUUUCCUAACAUACCU | 1018 | 3801 | AUUUUUUCCUAACAUACCU | 1018 | 3823 | AGGUAUGUUAGGAAAAAAU | 1241 |
| 3819 | UAAGCAAACCCAGUGUCAG | 1019 | 3819 | UAAGCAAACCCAGUGUCAG | 1019 | 3841 | CUGACACUGGGUUUGCUUA | 1242 |
| 3837 | GGAUGGUAAUUCUUAUUCU | 1020 | 3837 | GGAUGGUAAUUCUUAUUCU | 1020 | 3859 | AGAAUAAGAAUUACCAUCC | 1243 |
| 3855 | UUUCGUUCAGUUAAGUUUU | 1021 | 3855 | UUUCGUUCAGUUAAGUUUU | 1021 | 3877 | AAAACUUAACUGAACGAAA | 1244 |
| 3873 | UUCCCUUCAUCUGGGCACU | 1022 | 3873 | UUCCCUUCAUCUGGGCACU | 1022 | 3895 | AGUGCCCAGAUGAAGGGAA | 1245 |
| 3891 | UGAAGGGAUAUGUGAAACA | 1023 | 3891 | UGAAGGGAUAUGUGAAACA | 1023 | 3913 | UGUUUCACAUAUCCCUUCA | 1246 |
| 3909 | AAUGUUAACAUUUUUGGUA | 1024 | 3909 | AAUGUUAACAUUUUUGGUA | 1024 | 3931 | UACCAAAAAUGUUAACAUU | 1247 |
| 3927 | AGUCUUCAACCAGGGAUUG | 1025 | 3927 | AGUCUUCAACCAGGGAUUG | 1025 | 3949 | CAAUCCCUGGUUGAAGACU | 1248 |
| 3945 | GUUUCUGUUUAACUUCUUA | 1026 | 3945 | GUUUCUGUUUAACUUCUUA | 1026 | 3967 | UAAGAAGUUAAACAGAAAC | 1249 |
| 3963 | AUAGGAAAGCUUGAGUAAA | 1027 | 3963 | AUAGGAAAGCUUGAGUAAA | 1027 | 3985 | UUUACUCAAGCUUUCCUAU | 1250 |
| 3981 | AAUAAAUAUUGUCUUUUUG | 1028 | 3981 | AAUAAAUAUUGUCUUUUUG | 1028 | 4003 | CAAAAAGACAAUAUUUAUU | 1251 |
| 3986 | AUAUUGUCUUUUUGUAUGU | 1029 | 3986 | AUAUUGUCUUUUUGUAUGU | 1029 | 4008 | ACAUACAAAAAGACAAUAU | 1252 |

The 3′-ends of the Upper sequence and the Lower sequence of the siNA construct can include an overhang sequence, for example about 1, 2, 3, or 4 nucleotides in length, preferably 2 nucleotides in length, wherein the overhanging sequence of the lower sequence is optionally complementary to a portion of the target sequence.
The upper sequence is also referred to as the sense strand, whereas the lower sequence is also referred to as the antisense strand. The upper and lower sequences in the Table can further comprise a chemical modification having Formulae I-VII, such as exemplary siNA constructs shown in FIGS. 4 and 5, or having modifications described in Table IV or any combination thereof.

[0429] TABLE III
Interleukin and Interleukin receptor Synthetic Modified siNA constructs

IL2RG

Tar-

| | | | |
|---|---|---|---|
| get | Seq | Cmpd | Seq |

| | | | | | | |
|---|---|---|---|---|---|---|
| Pos | Target | ID | # | Aliases | Sequence | ID |

| | | | | | |
|---|---|---|---|---|---|
| 118 | ACACCACAGCUGAUUUCUUCCUG | 1253 | IL2RG:120U21 sense siNA | ACCACAGCUGAUUUCUUCCTT | 1311 |
| 130 | AUUUCUUCCUGACCACUAUGCCC | 1254 | IL2RG:132U21 sense siNA | UUCUUCCUGACCACUAUGCTT | 1312 |
| 138 | CUGACCACUAUGCCCACUGACUC | 1255 | IL2RG:140U21 sense siNA | GACCACUAUGCCCACUGACTT | 1313 |
| 155 | UGACUCCCUCAGUGUUUCCACUC | 1256 | IL2RG:157U21 sense siNA | ACUCCCUCAGUGUUUCCACTT | 1314 |
| 262 | CCAACCUCACUCUGCAUUAUUGG | 1257 | IL2RG:264U21 sense siNA | AACCUCACUCUGCAUUAUUTT | 1315 |
| 302 | UGAUAAAGUCCAGAAGUGCAGCC | 1258 | IL2RG:304U21 sense siNA | AUAAAGUCCAGAAGUGCAGTT | 1316 |
| 303 | GAUAAAGUCCAGAAGUGCAGCCA | 1259 | IL2RG:305U21 sense siNA | UAAAGUCCAGAAGUGCAGCTT | 1317 |
| 344 | AAUCACUUCUGGCUGUCAGUUGC | 1260 | IL2RG:346U21 sense siNA | UCACUUCUGGCUGUCAGUUTT | 1318 |
| 118 | ACACCACAGCUGAUUUCUUCCUG | 1253 | IL2RG:138L21 antisense siNA | GGAAGAAAUCAGCUGUGGUTT | 1319 |
| | | | (120C) | | |
| 130 | AUUUCUUCCUGACCACUAUGCCC | 1254 | IL2RG:150L21 antisense siNA | GCAUAGUGGUCAGGAAGAATT | 1320 |
| | | | (132C) | | |
| 138 | CUGACCACUAUGCCCACUGACUC | 1255 | IL2RG:158L21 antisense siNA | GUCAGUGGGCAUAGUGGUCTT | 1321 |
| | | | (140C) | | |
| 155 | UGACUCCCUCAGUGUUUCCACUC | 1256 | IL2RG:175L21 antisense siNA | GUGGAAACACUGAGGGAGUTT | 1322 |
| | | | (157C) | | |
| 262 | CCAACCUCACUCUGCAUUAUUGG | 1257 | IL2RG:282L21 antisense siNA | AAUAAUGCAGAGUGAGGUUTT | 1323 |
| | | | (264C) | | |
| 302 | UGAUAAAGUCCAGAAGUGCAGCC | 1258 | IL2RG:322L21 antisense siNA | CUGCACUUCUGGACUUUAUTT | 1324 |
| | | | (304C) | | |
| 303 | GAUAAAGUCCAGAAGUGCAGCCA | 1259 | IL2RG:323L21 antisense siNA | GCUGCACUUCUGGACUUUATT | 1325 |
| | | | (305C) | | |
| 344 | AAUCACUUCUGGCUGUCAGUUGC | 1260 | IL2RG:364L21 antisense siNA | AACUGACAGCCAGAAGUGATT | 1326 |
| | | | (346C) | | |
| 118 | ACACCACAGCUGAUUUCUUCCUG | 1253 | IL2RG:120U21 sense siNA stab04 | B AccAcAGcuGAuuucuuccTT B | 1327 |
| 130 | AUUUCUUCCUGACCACUAUGCCC | 1254 | IL2RG:132U21 sense siNA stab04 | B uucuuccuGAccAcuAuGcTT B | 1328 |
| 138 | CUGACCACUAUGCCCACUGACUC | 1255 | IL2RG:140U21 sense siNA stab04 | B GAccAcuAuGcccAcuGAcTT B | 1329 |
| 155 | UGACUCCCUCAGUGUUUCCACUC | 1256 | IL2RG:157U21 sense siNA stab04 | B AcucccucAGuGuuuccAcTT B | 1330 |
| 262 | CCAACCUCACUCUGCAUUAUUGG | 1257 | IL2RG:264U21 sense siNA stab04 | B AAccucAcucuGcAuuAuuTT B | 1331 |
| 302 | UGAUAAAGUCCAGAAGUGCAGCC | 1258 | IL2RG:304U21 sense siNA stab04 | B AuAAAGuccAGAAGuGcAGTT B | 1332 |
| 303 | GAUAAAGUCCAGAAGUGCAGCCA | 1259 | IL2RG:305U21 sense siNA stab04 | B uAAAGuccAGPAGuGcAGcTT B | 1333 |
| 344 | AAUCACUUCUGGCUGUCAGUUGC | 1260 | IL2RG:346U21 sense siNA stab04 | B ucAcuucuGGcuGucAGuuTT B | 1334 |
| 118 | ACACCACAGCUGAUUUCUUCCUG | 1253 | IL2RG:138L21 antisense siNA | GGAAGAAAucAGcuGuGGuTsT | 1335 |
| | | | (120C) stab05 | | |
| 130 | AUUUCUUCCUGACCACUAUGCCC | 1254 | IL2RG:150L21 antisense siNA | GcAuAGuGGucAGGAAGAATsT | 1336 |
| | | | (132C) stab05 | | |
| 138 | CUGACCACUAUGCCCACUGACUC | 1255 | IL2RG:158L21 antisense siNA | GucAGuGGGcAuAGuGGucTsT | 1337 |
| | | | (140C) stab05 | | |
| 155 | UGACUCCCUCAGUGUUUCCACUC | 1256 | IL2RG:175L21 antisense siNA | GuGGAAAcAcuGAGGGAGuTsT | 1338 |
| | | | (157C) stab05 | | |
| 262 | CCAACCUCACUCUGCAUUAUUGG | 1257 | IL2RG:282L21 antisense siNA | AAuAAuGcAGAGuGAGGuuTsT | 1339 |
| | | | (264C) stab05 | | |
| 302 | UGAUAAAGUCCAGAAGUGCAGCC | 1258 | IL2RG:322L21 antisense siNA | cuGcAcuucuGGAcuuuAuTsT | 1340 |
| | | | (304C) stab05 | | |
| 303 | GAUAAAGUCCAGAAGUGCAGCCA | 1259 | IL2RG:323L21 antisense siNA | GcuGcAcuucuGGAcuuuATsT | 1341 |
| | | | (305C) stab05 | | |
| 344 | AAUCACUUCUGGCUGUCAGUUGC | 1260 | IL2RG:364L21 antisense siNA | AAcuGAcAGccAGAAGuGATsT | 1342 |
| | | | (346C) stab05 | | |
| 118 | ACACCACAGCUGAUUUCUUCCUG | 1253 | IL2RG:120U21 sense siNA stab07 | B AccAcAGcuGAuuucuuccTT B | 1343 |
| 130 | AUUUCUUCCUGACCACUAUGCCC | 1254 | IL2RG:132U21 sense siNA stab07 | B uucuuccuGAccAcuAuGcTT B | 1344 |
| 138 | CUGACCACUAUGC0CACUGACUC | 1255 | IL2RG:140U21 sense siNA stab07 | B GAccAcuAuGcccAcuGAcTT B | 1345 |
| 155 | UGACUCCCUCAGUGUUUCCACUC | 1256 | IL2RG:157U21 sense siNA stab07 | B AcucccucAGuGuuuccAcTT B | 1346 |
| 262 | CCAACCUCACUCUGCAUUAUUGG | 1257 | IL2RG:264U21 sense siNA stab07 | B AAccucAcucuGcAuuAuuTT B | 1347 |
| 302 | UGAUAAAGUCCAGAAGUGCAGCC | 1258 | IL2RG:304U21 sense siNA stab07 | B AuAAAGuccAGAAGuGcAGTT B | 1348 |
| 303 | GAUAAAGUCCAGAAGUGCAGCCA | 1259 | IL2RG:305U21 sense siNA stab07 | B uAAAGuccAGAAGuGcAGcTT B | 1349 |
| 344 | AAUCACUUCUGGCUGUCAGUUGC | 1260 | IL2RG:346U21 sense siNA stab07 | B ucAcuucuGGcuGucAGuuTT B | 1350 |
| 118 | ACACCACAGCUGAUUUCUUCCUG | 1253 | IL2RG:138L21 antisense siNA | GGAAGAAAucAGcuGuGGuTsT | 1351 |
| | | | (120C) stab11 | | |
| 130 | AUUUCUUCCUGACCACUAUGCCC | 1254 | IL2RG:150L21 antisense siNA | GcAuAGuGGucAGGAAGAATsT | 1352 |
| | | | (132C) stab11 | | |
| 138 | CUGACCACUAUGCCCACUGACUC | 1255 | IL2RG:158L21 antisense siNA | GucAGuGGGcAuAGuGGucTsT | 1353 |
| | | | (140C) stab11 | | |
| 155 | UGACUCCCUCAGUGUUUCCACUC | 1256 | IL2RG:175L21 antisense siNA | GuGGAAAcAcuGAGGGAGuTsT | 1354 |
| | | | (157C) stab11 | | |
| 262 | CCAACCUCACUCUGCAUUAUUGG | 1257 | IL2RG:282L21 antisense siNA | AAuAAuGcAGAGuGAGGuuTsT | 1355 |
| | | | (264C) stab11 | | |
| 302 | UGAUAAAGUCCAGAAGUGCAGCC | 1258 | IL2RG:322L21 antisense siNA | cuGcAcuucuGGAcuuuAuTsT | 1356 |
| | | | (304C) stab11 | | |
| 303 | GAUAAAGUCCAGAAGUGCAGCCA | 1259 | IL2RG:323L21 antisense siNA | GcuGcAcuucuGGAcuuuATsT | 1357 |
| | | | (305C) stab11 | | |
| 344 | AAUCACUUCUGGCUGUCAGUUGC | 1260 | IL2RG:364L21 antisense siNA | AAcuGAcAGccAGAAGuGATsT | 1358 |
| | | | (346C) stab11 | | |
| 118 | ACACCACAGCUGAUUUCUUCCUG | 1253 | IL2RG:120U21 sense siNA stab18 | B AccAcAGcuGAuuucuuccTT B | 1359 |
| 130 | AUUUCUUCCUGACCACUAUGCCC | 1254 | IL2RG:132U21 sense siNA stab18 | B uucuuccuGAccAcuAuGcTT B | 1360 |
| 138 | CUGACCACUAUGCCCACUGACUC | 1255 | IL2RG:140U21 sense siNA stab18 | B GAccAcuAuGcccAcuGAcTT B | 1361 |
| 155 | UGACUCCCUCAGUGUUUCCACUC | 1256 | IL2RG:157U21 sense siNA stab18 | B AcucccucAGuGuuuccAcTT B | 1362 |
| 262 | CCAACCUCACUCUGCAUUAUUGG | 1257 | IL2RG:264U21 sense siNA stab18 | B AAccucAcucuGcAuuAuuTT B | 1363 |
| 302 | UGAUAAAGUCCAGAAGUGCAGCC | 1258 | IL2RG:304U21 sense siNA stab18 | B AuAAAGuccAGAAGuGcAGTT B | 1364 |
| 303 | GAUAAAGUCCAGAAGUGCAGCCA | 1259 | IL2RG:305U21 sense siNA stab18 | B uAAAGuccAGAAGuGcAGcTT B | 1365 |
| 344 | AAUCACUUCUGGCUGUCAGUUGC | 1260 | IL2RG:346U21 sense siNA stab18 | B ucAcuucuGGcuGucAGuuTT B | 1366 |
| 118 | ACACCACAGCUGAUUUCUUCCUG | 1253 | IL2RG:138L21 antisense siNA | GGAAGAAAucAGcuGuGGuTsT | 1367 |
| | | | (120C) stab08 | | |
| 130 | AUUUCUUCCUGACCACUAUGCCC | 1254 | IL2RG:150L21 antisense siNA | GcAuAGuGGucAGGAAGAATsT | 1368 |
| | | | (132C) stab08 | | |
| 138 | CUGACCACUAUGCCCACUGACUC | 1255 | IL2RG:158L21 antisense siNA | GucAGuGGGcAuAGuGGucTsT | 1369 |
| | | | (140C) stab08 | | |
| 155 | UGACUCCCUCAGUGUUUCCACUC | 1256 | IL2RG:175L21 antisense siNA | GuGGAAAcAcuGAGGGAGuTsT | 1370 |
| | | | (157C) stab08 | | |
| 262 | CCAACCUCACUCUGCAUUAUUGG | 1257 | IL2RG:282L21 antisense siNA | AAuAAuGcAGAGuGAGGuuTsT | 1371 |
| | | | (264C) stab08 | | |
| 302 | UGAUAAAGUCCAGAAGUGCAGCC | 1258 | IL2RG:322L21 antisense siNA | cuGcAcuucuGGAcuuuAuTsT | 1372 |
| | | | (304C) stab08 | | |
| 303 | GAUAAAGUCCAGAAGUGCAGCCA | 1259 | IL2RG:323L21 antisense siNA | GcuGcAcuucuGGAcuuuATsT | 1373 |
| | | | (305C) stab08 | | |
| 344 | AAUCACUUCUGGCUGUCAGUUGC | 1260 | IL2RG:364L21 antisense siNA | AAcuGAcAGccAGAAGuGATsT | 1374 |
| | | | (346C) stab08 | | |
| 118 | ACACCACAGCUGAUUUCUUCCUG | 1253 | IL2RG:120U21 sense siNA stab09 | B ACCACAGCUGAUUUCUUCCTT B | 1375 |
| 130 | AUUUCUUCCUGACCACUAUGCCC | 1254 | IL2RG:132U21 sense siNA stab09 | B UUCUUCCUGACCACUAUGCTT B | 1376 |
| 138 | CUGACCACUAUGCCCACUGACUC | 1255 | IL2RG:140U21 sense siNA stab09 | B GACCACUAUGCCCACUGACTT B | 1377 |
| 155 | UGACUCCCUCAGUGUUUCCACUC | 1256 | IL2RG:157U21 sense siNA stab09 | B ACUCCCUCAGUGUUUCCACTT B | 1378 |
| 262 | CCAACCUCACUCUGCAUUAUUGG | 1257 | IL2RG:264U21 sense siNA stab09 | B AACCUCACUCUGCAUUAUUTT B | 1379 |
| 302 | UGAUAAAGUCCAGAAGUGCAGCC | 1258 | IL2RG:304U21 sense siNA stab09 | B AUAAAGUCCAGAAGUGCAGTT B | 1380 |
| 303 | GAUAAAGUCCAGAAGUGCAGCCA | 1259 | IL2RG:305U21 sense siNA stab09 | B UAAAGUCCAGAAGUGCAGCTT B | 1381 |
| 344 | AAUCACUUCUGGCUGUCAGUUGC | 1260 | IL2RG:346U21 sense siNA stab09 | B UCACUUCUGGCUGUCAGUUTT B | 1382 |
| 118 | ACACCACAGCUGAUUUCUUCCUG | 1253 | IL2RG:138L21 antisense siNA | GGAAGAAAUCAGCUGUGGUTsT | 1383 |
| | | | (120C) stab10 | | |
| 130 | AUUUCUUCCUGACCACUAUGCCC | 1254 | IL2RG:150L21 antisense siNA | GCAUAGUGGUCAGGAAGAATsT | 1384 |
| | | | (132C) stab10 | | |
| 138 | CUGACCACUAUGCCCACUGACUC | 1255 | IL2RG:158L21 antisense siNA | GUCAGUGGGCAUAGUGGUCTsT | 1385 |
| | | | (140C) stab10 | | |
| 155 | UGACUCCCUCAGUGUUUCCACUC | 1256 | IL2RG:175L21 antisense siNA | GUGGAAACACUGAGGGAGUTsT | 1386 |
| | | | (157C) stab10 | | |
| 262 | CCAACCUCACUCUGCAUUAUUGG | 1257 | IL2RG:282L21 antisense siNA | AAUAAUGCAGAGUGAGGUUTsT | 1387 |
| | | | (264C) stab10 | | |
| 302 | UGAUAAAGUCCAGAAGUGCAGCC | 1258 | IL2RG:322L21 antisense siNA | CUGCACUUCUGGACUUUAUTsT | 1388 |
| | | | (304C) stab10 | | |
| 303 | GAUAAAGUCCAGAAGUGCAGCCA | 1259 | IL2RG:323L21 antisense siNA | GCUGCACUUCUGGACUUUATsT | 1389 |
| | | | (305C) stab10 | | |
| 344 | AAUCACUUCUGGCUGUCAGUUGC | 1260 | IL2RG:364L21 antasense siNA | AACUGACAGCCAGAAGUGATsT | 1390 |
| | | | (346C) stab10 | | |
| 118 | ACACCACAGCUGAUUUCUUCCUG | 1253 | IL2RG:138L21 antisense siNA | GGAAGAAAucAGcuGuGGuTT B | 1391 |
| | | | (120C) stab19 | | |
| 130 | AUUUCUUCCUGACCACUAUGCCC | 1254 | IL2RG:150L21 antisense siNA | GcAuAGuGGucAGGAAGAATT B | 1392 |
| | | | (132C) stab19 | | |
| 138 | CUGACCACUAUGCCCACUGACUC | 1255 | IL2RG:158L21 antisense siNA | GucAGuGGGcAuAGuGGucTT B | 1393 |
| | | | (140C) stab19 | | |
| 155 | UGACUCCCUCAGUGUUUCCACUC | 1256 | IL2RG:175L21 antisense siNA | GuGGAAAcAcuGAGGGAGuTT B | 1394 |
| | | | (157C) stab19 | | |
| 262 | CCAACCUCACUCUGCAUUAUUGG | 1257 | IL2RG:282L21 antisense siNA | AAuAAuGcAGAGuGAGGuuTT B | 1395 |
| | | | (264C) stab19 | | |
| 302 | UGAUAAAGUCCAGAAGUGCAGCC | 1258 | IL2RG:322L21 antisense siNA | cuGcAcuucuGGAcuuuAuTT B | 1396 |
| | | | (304C) stab19 | | |
| 303 | GAUAAAGUCCAGAAGUGCAGCCA | 1259 | IL2RG:323L21 antisense siNA | GcuGcAcuucuGGAcuuuATT B | 1397 |
| | | | (305C) stab19 | | |
| 344 | AAUCACUUCUGGCUGUCAGUUGC | 1260 | IL2RG:364L21 antisense siNA | AAcuGAcAGccAGAAGuGATT B | 1398 |
| | | | (346C) stab19 | | |
| 118 | ACACCACAGCUGAUUUCUUCCUG | 1253 | IL2RG:138L21 antisense siNA | GGAAGAAAUCAGCUGUGGUTT B | 1399 |
| | | | (120C) stab22 | | |
| 130 | AUUUCUUCCUGACCACUAUGCCC | 1254 | IL2RG:150L21 antisense siNA | GCAUAGUGGUCAGGAAGAATT B | 1400 |
| | | | (132C) stab22 | | |
| 138 | CUGACCACUAUGCCCACUGACUC | 1255 | IL2RG:158L21 antisense siNA | GUCAGUGGGCAUAGUGGUCTT B | 1401 |
| | | | (140C) stab22 | | |
| 155 | UGACUCCCUCAGUGUUUCCACUC | 1256 | IL2RG:175L21 antisense siNA | GUGGAAACACUGAGGGAGUTT B | 1402 |
| | | | (157C) stab22 | | |
| 262 | CCAACCUCACUCUGCAUUAUUGG | 1257 | IL2RG:282L21 antisense siNA | AAUAAUGCAGAGUGAGGUUTT B | 1403 |
| | | | (264C) stab22 | | |
| 302 | UGAUAAAGUCCAGAAGUGCAGCC | 1258 | IL2RG:322L21 antisense siNA | CUGCACUUCUGGACUUUAUTT B | 1404 |
| | | | (304C) stab22 | | |
| 303 | GAUAAAGUCCAGAAGUGCAGCCA | 1259 | IL2RG:323L21 antisense siNA | GCUGCACUUCUGGACUUUATT B | 1405 |
| | | | (305C) stab22 | | |
| 344 | AAUCACUUCUGGCUGUCAGUUGC | 1260 | IL2RG:364L21 antisense siNA | AACUGACAGCCAGAAGUGATT B | 1406 |
| | | | (346C) stab22 | | |

IL4

Tar-

| | | |
|---|---|---|
| get | Seq | Seq |

| | | | | | |
|---|---|---|---|---|---|
| Pos | Target | ID | Aliases | Sequence | ID |

| | | | | | |
|---|---|---|---|---|---|
| 487 | CAGCCUCACAGAGCAGAAGACUC | 1269 | IL4:489U21 sense siNA | GCCUCACAGAGCAGAAGACTT | 1407 |
| 489 | GCCUCACAGAGCAGAAGACUCUG | 1270 | IL4:491U21 sense siNA | CUCACAGAGCAGAAGACUCTT | 1408 |
| 516 | CCGAGUUGACCGUAACAGACAUC | 1271 | IL4:518U21 sense siNA | GAGUUGACCGUAACAGACATT | 1409 |
| 526 | CGUAACAGACAUCUUUGCUGCCU | 1272 | IL4:528U21 sense siNA | UAACAGACAUCUUUGCUGCTT | 1410 |
| 545 | GCCUCCAAGAACACAACUGAGAA | 1273 | IL4:547U21 sense siNA | CUCCAAGAACACAACUGAGTT | 1411 |
| 606 | UCUACAGCCACCAUGAGAAGGAC | 1274 | IL4:608U21 sense siNA | UACAGCCACCAUGAGAAGGTT | 1412 |
| 728 | UUGAAUUCCUGUCCUGUGAAGGA | 1275 | IL4:730U21 sense siNA | GAAUUCCUGUCCUGUGAAGTT | 1413 |
| 745 | GAAGGAAGCCAACCAGAGUACGU | 1276 | IL4:747U21 sense siNA | AGGAAGCCAACCAGAGUACTT | 1414 |
| 487 | CAGCCUCACAGAGCAGAAGACUC | 1269 | IL4:507L21 antisense siNA | GUCUUCUGCUCUGUGAGGCTT | 1415 |
| | | | (489C) | | |
| 489 | GCCUCACAGAGCAGAAGACUCUG | 1270 | IL4:509L21 antisense siNA | GAGUCUUCUGCUCUGUGAGTT | 1416 |
| | | | (491C) | | |
| 516 | CCGAGUUGACCGUAACAGACAUC | 1271 | IL4:536L21 antisense siNA | UGUCUGUUACGGUCAACUCTT | 1417 |
| | | | (518C) | | |
| 526 | CGUAACAGACAUCUUUGCUGCCU | 1272 | IL4:546L21 antisense siNA | GCAGCAAAGAUGUCUGUUATT | 1418 |
| | | | (528C) | | |
| 545 | GCCUCCAAGAACACAACUGAGAA | 1273 | IL4:565L21 antisense siNA | CUCAGUUGUGUUCUUGGAGTT | 1419 |
| | | | (547C) | | |
| 606 | UCUACAGCCACCAUGAGAAGGAC | 1274 | IL4:626L21 antisense siNA | CCUUCUCAUGGUGGCUGUATT | 1420 |
| | | | (608C) | | |
| 728 | UUGAAUUCCUGUCCUGUGAAGGA | 1275 | IL4:748L21 antisense siNA | CUUCACAGGACAGGAAUUCTT | 1421 |
| | | | (730C) | | |
| 745 | GAAGGAAGCCAACCAGAGUACGU | 1276 | IL4:765L21 antisense siNA | GUACUCUGGUUGGCUUCCUTT | 1422 |
| | | | (747C) | | |
| 487 | CAGCCUCACAGAGCAGAAGACUC | 1269 | IL4:489U21 sense siNA stab04 | B GccucAcAGAGcAGAAGAcTT B | 1423 |
| 489 | GCCUCACAGAGCAGAAGACUCUG | 1270 | IL4:491U21 sense siNA stab04 | B cucAcAGAGcAGAAGAcucTT B | 1424 |
| 516 | CCGAGUUGACCGUAACAGACAUC | 1271 | IL4:518U21 sense siNA stab04 | B GAGuuGAccGuAAcAGAcATT B | 1425 |
| 526 | CGUAACAGACAUCUUUGCUGCCU | 1272 | IL4:528U21 sense siNA stab04 | B uAAcAGAcAucuuuGcuGcTT B | 1426 |
| 545 | GCCUCCAAGAACACAACUGAGAA | 1273 | IL4:547U21 sense siNA stab04 | B cuccAAGAAcAcAAcuGAGTT B | 1427 |
| 606 | UCUACAGCCACCAUGAGAAGGAC | 1274 | IL4:608U21 sense siNA stab04 | B uAcAGccAccAuGAGAAGGTT B | 1428 |
| 728 | UUGAAUUCCUGUCCUGUGAAGGA | 1275 | IL4:730U21 sense siNA stab04 | B GAAuuccuGuccuGuGAAGTT B | 1429 |
| 745 | GAAGGAAGCCAACCAGAGUACGU | 1276 | IL4:747U21 sense siNA stab04 | B AGGAAGccAAccAGAGuAcTT B | 1430 |
| 487 | CAGCCUCACAGAGCAGAAGACUC | 1269 | IL4:507L21 antisense siNA | GucuucuGcucuGuGAGGcTsT | 1431 |
| | | | (489C) stab05 | | |
| 489 | GCCUCACAGAGCAGAAGACUCUG | 1270 | IL4:509L21 antisense siNA | GAGucuucuGcucuGuGAGTsT | 1432 |
| | | | (491C) stab05 | | |
| 516 | CCGAGUUGACCGUAACAGACAUC | 1271 | IL4:536L21 antisense siNA | uGucuGuuAcGGucAAcucTsT | 1433 |
| | | | (518C) stab05 | | |
| 526 | CGUAACAGACAUCUUUGCUGCCU | 1272 | IL4:546L21 antisense siNA | GcAGcAAAGAuGucuGuuATsT | 1434 |
| | | | (528C) stab05 | | |
| 545 | GCCUCCAAGAACACAACUGAGAA | 1273 | IL4:565L21 antisense siNA | cucAGuuGuGuucuuGGAGTsT | 1435 |
| | | | (547C) stab05 | | |
| 606 | UCUACAGCCACCAUGAGAAGGAC | 1274 | IL4:626L21 antisense siNA | ccuucucAuGGuGGcuGuATsT | 1436 |
| | | | (608C) stab05 | | |
| 728 | UUGAAUUCCUGUCCUGUGAAGGA | 1275 | IL4:748L21 antisense siNA | cuucAcAGGAcAGGAAuucTsT | 1437 |
| | | | (730C) stab05 | | |
| 745 | GAAGGAAGCCAACCAGAGUACGU | 1276 | IL4:765L21 antisense siNA | GuAcucuGGuuGGcuuccuTsT | 1438 |
| | | | (747C) stab05 | | |
| 487 | CAGCCUCACAGAGCAGAAGACUC | 1269 | IL4:489U21 sense siNA stab07 | B GccucAcAGAGcAGAAGAcTT B | 1439 |
| 489 | GCCUCACAGAGCAGAAGACUCUG | 1270 | IL4:491U21 sense siNA stab07 | B cucAcAGAGcAGAAGAcucTT B | 1440 |
| 516 | CCGAGUUGACCGUAACAGACAUC | 1271 | lL4:518U21 sense siNA stab07 | B GAGuuGAccGuAAcAGAcATT B | 1441 |
| 526 | CGUAACAGACAUCUUUGCUGCCU | 1272 | IL4:528U21 sense siNA stab07 | B uAAcAGAcAucuuuGcuGcTT B | 1442 |
| 545 | GCCUCCAAGAACACAACUGAGAA | 1273 | IL4:547U21 sense siNA stab07 | B cuccAAGAAcAcAAcuGAGTT B | 1443 |
| 606 | UCUACAGCCACCAUGAGAAGGAC | 1274 | IL4:608U21 sense siNA stab07 | B uAcAGccAccAuGAGAAGGTT B | 1444 |
| 728 | UUGAAUUCCUGUCCUGUGAAGGA | 1275 | IL4:730U21 sense siNA stab07 | B GAAuuccuGuccuGuGAAGTT B | 1445 |
| 745 | GAAGGAAGCCAACCAGAGUACGU | 1276 | IL4:747U21 sense siNA stab07 | B AGGAAGccAAccAGAGuAcTT B | 1446 |
| 487 | CAGCCUCACAGAGCAGAAGACUC | 1269 | IL4:507L21 antisense siNA | GucuucuGcucuGuGAGGcTsT | 1447 |
| | | | (489C) stab11 | | |
| 489 | GCCUCACAGAGCAGAAGACUCUG | 1270 | IL4:509L21 antisense siNA | GAGucuucuGcucuGuGAGTsT | 1448 |
| | | | (491C) stab11 | | |
| 516 | CCGAGUUGACCGUAACAGACAUC | 1271 | IL4:536L21 antisense siNA | uGucuGuuAcGGucAAcucTsT | 1449 |
| | | | (518C) stab11 | | |
| 526 | CGUAACAGACAUCUUUGCUGCCU | 1272 | IL4:546L21 antisense siNA | GcAGcAAAGAuGucuGuuATsT | 1450 |
| | | | (528C) stab11 | | |
| 545 | GCCUCCAAGAACACAACUGAGAA | 1273 | IL4:565L21 antisense siNA | cucAGuuGuGuucuuGGAGTsT | 1451 |
| | | | (547C) stab11 | | |
| 606 | UCUACAGCCACCAUGAGAAGGAC | 1274 | IL4:626L21 antisense siNA | ccuucucAuGGuGGcuGuATsT | 1452 |
| | | | (608C) stab11 | | |
| 728 | UUGAAUUCCUGUCCUGUGAAGGA | 1275 | IL4:748L21 antisense siNA | cuucAcAGGAcAGGAAuucTsT | 1453 |
| | | | (730C) stab11 | | |
| 745 | GAAGGAAGCCAACCAGAGUACGU | 1276 | IL4:765L21 antisense siNA | GuAcucuGGuuGGcuuccuTsT | 1454 |
| | | | (747C) stab11 | | |
| 487 | CAGCCUCACAGAGCAGAAGACUC | 1269 | IL4:489U21 sense siNA stab18 | B GccucAcAGAGcAGAAGAcTT B | 1455 |
| 489 | GCCUCACAGAGCAGAAGACUCUG | 1270 | IL4:491U21 sense siNA stab18 | B cucAcAGAGcAGAAGAcucTT B | 1456 |
| 516 | CCGAGUUGACCGUAACAGACAUC | 1271 | IL4:518U21 sense siNA stab18 | B GAGuuGAccGuAAcAGAcATT B | 1457 |
| 526 | CGUAACAGACAUCUUUGCUGCCU | 1272 | IL4:528U21 sense siNA stab18 | B uAAcAGAcAucuuuGcuGcTT B | 1458 |
| 545 | GCCUCCAAGAACACAACUGASAA | 1273 | IL4:547U21 sense siNA stab18 | B cuccAAGAAcAcAAcuGAGTT B | 1459 |
| 606 | UCUACAGCCACCAUGAGAAGGAC | 1274 | IL4:608U21 sense siNA stab18 | B uAcAGccAccAuGAGAAGGTT B | 1460 |
| 728 | UUGAAUUCCUGUCCUGUGAAGGA | 1275 | IL4:730U21 sense siNA stab18 | B GAAuuccuGuccuGuGAAGTT B | 1461 |
| 745 | GAAGGAAGCCAACCAGAGUACGU | 1276 | IL4:747U21 sense siNA stab18 | B AGGAAGccAAccAGAGuAcTT B | 1462 |
| 487 | CAGCCUCACAGAGCAGAAGACUC | 1269 | IL4:507L21 antisense siNA | GucuucuGcucuGuGAGGcTsT | 1463 |
| | | | (489C) stab08 | | |
| 489 | GCCUCACAGAGCAGAAGACUCUG | 1270 | IL4:509L21 antisense siNA | GAGucuucuGcucuGuGAGTsT | 1464 |
| | | | (491C) stab08 | | |
| 516 | CCGAGUUGACCGUAACAGACAUC | 1271 | IL4:536L21 antisense siNA | uGucuGuuAcGGucAAcucTsT | 1465 |
| | | | (518C) stab08 | | |
| 526 | CGUAACAGACAUCUUUGCUGCCU | 1272 | IL4:546L21 antisense siNA | GcAGcAAAGAuGucuGuuATsT | 1466 |
| | | | (528C) stab08 | | |
| 545 | GCCUCCAAGAACACAACUGAGAA | 1273 | IL4:565L21 antisense siNA | cucAGuuGuGuucuuGGAGTsT | 1467 |
| | | | (547C) stab08 | | |
| 606 | UCUACAGCCACCAUGAGAAGGAC | 1274 | IL4:626L21 antisense siNA | ccuucucAuGGuGGcuGuATsT | 1468 |
| | | | (608C) stab08 | | |
| 728 | UUGAAUUCCUGUCCUGUGAAGGA | 1275 | IL4:748L21 antisense siNA | cuucAcAGGAcAGGAAuucTsT | 1469 |
| | | | (730C) stab08 | | |
| 745 | GAAGGAAGCCAACCAGAGUACGU | 1276 | IL4:765L21 antisense siNA | GuAcucuGGuuGGcuuccuTsT | 1470 |
| | | | (747C) stab08 | | |
| 487 | CAGCCUCACAGAGCAGAAGACUC | 1269 | IL4:489U21 sense siNA stab09 | B GCCUCACAGAGCAGAAGACTT B | 1471 |
| 489 | GCCUCACAGAGCAGAAGACUCUG | 1270 | IL4:491U21 sense siNA stab09 | B CUCACAGAGCAGAAGACUCTT B | 1472 |
| 516 | CCGAGUUGACCGUAACAGACAUC | 1271 | IL4:518U21 sense siNA stab09 | B GAGUUGACCGUAACAGACATT B | 1473 |
| 526 | CGUAACAGACAUCUUUGCUGCCU | 1272 | IL4:528U21 sense siNA stab09 | B UAACAGACAUCUUUGCUGCTT B | 1474 |
| 545 | GCCUCCAAGAACACAACUGAGAA | 1273 | IL4:547U21 sense siNA stab09 | B CUCCAAGAACACAACUGAGTT B | 1475 |
| 606 | UCUACAGCCACCAUGAGAAGGAC | 1274 | IL4:608U21 sense siNA stab09 | B UACAGCCACCAUGAGAAGGTT B | 1476 |
| 728 | UUGAAUUCCUGUCCUGUGAAGGA | 1275 | IL4:730U21 sense siNA stab09 | B GAAUUCCUGUCCUGUGAAGTT B | 1477 |
| 745 | GAAGGAAGCCAACCAGAGUACGU | 1276 | IL4:747U21 sense siNA stab09 | B AGGAAGCCAACCAGAGUACTT B | 1478 |
| 487 | CAGCCUCACAGAGCAGAAGACUC | 1269 | IL4:507L21 antisense siNA | GUCUUCUGCUCUGUGAGGCTsT | 1479 |
| | | | (489C) stab10 | | |
| 489 | GCCUCACAGAGCAGAAGACUCUG | 1270 | IL4:509L21 antisense siNA | GAGUCUUCUGCUCUGUGAGTsT | 1480 |
| | | | (491C) stab10 | | |
| 516 | CCGAGUUGACCGUAACAGACAUC | 1271 | IL4:536L21 antisense siNA | UGUCUGUUACGGUCAACUCTsT | 1481 |
| | | | (518C) stab10 | | |
| 526 | CGUAACAGACAUCUUUGCUGCCU | 1272 | IL4:546L21 antisense siNA | GCAGCAAAGAUGUCUGUUATsT | 1482 |
| | | | (528C) stab10 | | |
| 545 | GCCUCCAAGAACACAACUGAGAA | 1273 | IL4:565L21 antisense siNA | CUCAGUUGUGUUCUUGGAGTsT | 1483 |
| | | | (547C) stab10 | | |
| 606 | UCUACAGCCACCAUGAGAAGGAC | 1274 | IL4:626L21 antisense siNA | CCUUCUCAUGGUGGCUGUATsT | 1484 |
| | | | (608C) stab10 | | |
| 728 | UUGAAUUCCUGUCCUGUGAAGGA | 1275 | IL4:748L21 antisense siNA | CUUCACAGGACAGGAAUUCTsT | 1485 |
| | | | (730C) stab10 | | |
| 745 | GAAGGAAGCCAACCAGAGUACGU | 1276 | IL4:765L21 antisense siNA | GUACUCUGGUUGGCUUCCUTsT | 1486 |
| | | | (747C) stab10 | | |
| 487 | CAGCCUCACAGAGCAGAAGACUC | 1269 | IL4:507L21 antisense siNA | GucuucuGcucuGuGAGGcTT B | 1487 |
| | | | (489C) stab19 | | |
| 489 | GCCUCACAGAGCAGAAGACUCUG | 1270 | IL4:509L21 antisense siNA | GAGucuucuGcucuGuGAGTT B | 1488 |
| | | | (491C) stab19 | | |
| 516 | CCGAGUUGACCGUAACAGACAUC | 1271 | IL4:536L21 antisense siNA | uGucuGuuAcGGucAAcucTT B | 1489 |
| | | | (518C) stab19 | | |
| 526 | CGUAACAGACAUCUUUGCUGCCU | 1272 | IL4:546L21 antisense siNA | GcAGcAAAGAuGucuGuuATT B | 1490 |
| | | | (528C) stab19 | | |
| 545 | GCCUCCAAGAACACAACUGAGAA | 1273 | IL4:565L21 antisense siNA | cucAGuuGuGuucuuGGAGTT B | 1491 |
| | | | (547C) stab19 | | |
| 606 | UCUACAGCCACCAUGAGAAGGAC | 1274 | IL4:626L21 antisense siNA | ccuucucAuGGuGGcuGuATT B | 1492 |
| | | | (608C) stab19 | | |
| 728 | UUGAAUUCCUGUCCUGUGAAGGA | 1275 | IL4:748L21 antisense siNA | cuucAcAGGAcAGGAAuucTT B | 1493 |
| | | | (730C) stab19 | | |
| 745 | GAAGGAAGCCAACCAGAGUACGU | 1276 | IL4:765L21 antisense siNA | GuAcucuGGuuGGcuuccuTT B | 1494 |
| | | | (747C) stab19 | | |
| 487 | CAGCCUCACAGAGCAGAAGACUC | 1269 | IL4:507L21 antsense siNA | GUCUUCUGCUCUGUGAGGCTT B | 1495 |
| | | | (489C) stab22 | | |
| 489 | GCCUCACAGAGCAGAAGACUCUG | 1270 | IL4:509L21 antisense siNA | GAGUCUUCUGCUCUGUGAGTT B | 1496 |
| | | | (491C) stab22 | | |
| 516 | CCGAGUUGACCGUAACAGACAUC | 1271 | IL4:536L21 antisense siNA | UGUCUGUUACGGUCAACUCTT B | 1497 |
| | | | (518C) stab22 | | |
| 526 | CGUAACAGACAUCUUUGCUGCCU | 1272 | IL4:546L21 antisense siNA | GCAGCAAAGAUGUCUGUUATT B | 1498 |
| | | | (528C) stab22 | | |
| 545 | GCCUCCAAGAACACAACUGAGAA | 1273 | IL4:565L21 antisense siNA | CUCAGUUGUGUUCUUGGAGTT B | 1499 |
| | | | (547C) stab22 | | |
| 606 | UCUACAGCCACCAUGAGAAGGAC | 1274 | IL4:626L21 antisense siNA | CCUUCUCAUGGUGGCUGUATT B | 1500 |
| | | | (608C) stab22 | | |
| 728 | UUGAAUUCCUGUCCUGUGAAGGA | 1275 | IL4:748L21 antisense siNA | CUUCACAGGACAGGAAUUCTT B | 1501 |
| | | | (730C) stab22 | | |
| 745 | GAAGGAAGCCAACCAGAGUACGU | 1276 | IL4:765L21 antisense siNA | GUACUCUGGUUGGCUUCCUTT B | 1502 |
| | | | (747C) stab22 | | |

IL4R

Tar-

| | | | |
|---|---|---|---|
| get | Seq | Cmpd | Seq |

| | | | | | | |
|---|---|---|---|---|---|---|
| Pos | Target | ID | # | Aliases | Sequence | ID |

| | | | | | | |
|---|---|---|---|---|---|---|
| 469 | CUAUACACUGGACCUGUGGGCUG | 1277 | | IL4R:471U21 sense siNA | AUACACUGGACCUGUGGGCTT | 1503 |
| 551 | CCAGGAAACCUGACAGUUCACAC | 1278 | | IL4R:553U21 sense siNA | AGGAAACCUGACAGUUCACTT | 1504 |
| 1119 | AGCACAACAUGAAAAGGGAUGAA | 1279 | | IL4R:1121U21 sense siNA | CACAACAUGAAAAGGGAUGTT | 1505 |
| 1120 | GCACAACAUGAAAAGGGAUGAAG | 1280 | | IL4R:1122U21 sense siNA | ACAACAUGAAAAGGGAUGATT | 1506 |
| 1132 | AAGGGAUGAAGAUCCUCACAAGG | 1281 | | IL4R:1134U21 sense siNA | GGGAUGAAGAUCCUCACAATT | 1507 |
| 3130 | UUGGGAAAUCGAUGAGAAAUUGA | 1282 | | IL4R:3132U21 sense siNA | GGGAAAUCGAUGAGAAAUUTT | 1508 |
| 3131 | UGGGAAAUCGAUGAGAAAUUGAA | 1283 | | IL4R:3133U21 sense siNA | GGAAAUCGAUGAGAAAUUGTT | 1509 |
| 3169 | UCAUUGCCUAGAGGUGCUCAUUC | 1284 | | IL4R:3171U21 sense siNA | AUUGCCUAGAGGUGCUCAUTT | 1510 |
| 469 | CUAUACACUGGACCUGUGGGCUG | 1277 | | IL4R:489L21 antisense siNA | GCCCACAGGUCCAGUGUAUTT | 1511 |
| | | | | (471C) | | |
| 551 | CCAGGAAACCUGACAGUUCACAC | 1278 | | IL4R:571 L21 antisense siNA | GUGAACUGUCAGGUUUCCUTT | 1512 |
| | | | | (553C) | | |
| 1119 | AGCACAACAUGAAAAGGGAUGAA | 1279 | | IL4R:1139L21 antisense siNA | CAUCCCUUUUCAUGUUGUGTT | 1513 |
| | | | | (1121C) | | |
| 1120 | GCACAACAUGAAAAGGGAUGAAG | 1280 | | IL4R:1140L21 antisense siNA | UCAUCCCUUUUCAUGUUGUTT | 1514 |
| | | | | (1122C) | | |
| 1132 | AAGGGAUGAAGAUCCUCACAAGG | 1281 | | IL4R:1152L21 antisense siNA | UUGUGAGGAUCUUCAUCCCTT | 1515 |
| | | | | (1134C) | | |
| 3130 | UUGGGAAAUCGAUGAGAAAUUGA | 1282 | | IL4R:3150L21 antisense siNA | AAUUUCUCAUCGAUUUCCCTT | 1516 |
| | | | | (3132C) | | |
| 3131 | UGGGAAAUCGAUGAGAAAUUGAA | 1283 | | IL4R:3151L21 antisense siNA | CAAUUUCUCAUCGAUUUCCTT | 1517 |
| | | | | (3133C) | | |
| 3169 | UCAUUGCCUAGAGGUGCUCAUUC | 1284 | | IL4R:3189L21 antisense siNA | AUGAGCACCUCUAGGCAAUTT | 1518 |
| | | | | (3171C) | | |
| 469 | CUAUACACUGGACCUGUGGGCUG | 1277 | | IL4R:471U21 sense siNA stab04 | B AuAcAcuGGAccuGuGGGcTT B | 1519 |
| 551 | CCAGGAAACCUGACAGUUCACAC | 1278 | | IL4R:553U21 sense siNAstab04 | B AGGAAAccuGAcAGuucAcTT B | 1520 |
| 1119 | AGCACAACAUGAAAAGGGAUGAA | 1279 | | IL4R:1121U21 sense siNA stab04 | B cAcAAcAuGAAAAGGGAuGTT B | 1521 |
| 1120 | GCACAACAUGAAAAGGGAUGAAG | 1280 | | IL4R:1122U21 sense siNA stab04 | B AcAAcAuGAAAAGGGAuGATT B | 1522 |
| 1132 | AAGGGAUGAAGAUCCUCACAAGG | 1281 | | IL4R:1134U21 sense siNA stab04 | B GGGAuGAAGAuccucAcAATT B | 1523 |
| 3130 | UUGGGAAAUCGAUGAGAAAUUGA | 1282 | | IL4R:3132U21 sense siNA stab04 | B GGGAAAucGAuGAGAAAuuTT B | 1524 |
| 3131 | UGGGAAAUCGAUGAGAAAUUGAA | 1283 | | IL4R:3133U21 sense siNA stab04 | B GGAAAucGAuGAGAAAuuGTT B | 1525 |
| 3169 | UCAUUGCCUAGAGGUGCUCAUUC | 1284 | | IL4R:3171U21 sense siNA stab04 | B AuuGccuAGAGGuGcucAuTT B | 1526 |
| 469 | CUAUACACUGGACCUGUGGGCUG | 1277 | | IL4R:489L21 antisense siNA | GcccAcAGGuccAGuGuAuTsT | 1527 |
| | | | | (471C) stab05 | | |
| 551 | CCAGGAAACCUGACAGUUCACAC | 1278 | | IL4R:571L21 antisense siNA | GuGAAcuGucAGGuuuccuTsT | 1528 |
| | | | | (553C) stab05 | | |
| 1119 | AGCACAACAUGAAAAGGGAUGAA | 1279 | | IL4R:1139L21 antisense siNA | cAucccuuuucAuGuuGuGTsT | 1529 |
| | | | | (1121C) stab05 | | |
| 1120 | GCACAACAUGAAAAGGGAUGAAG | 1280 | | IL4R:1140L21 antisense siNA | ucAucccuuuucAuGuuGuTsT | 1530 |
| | | | | (1122C) stab05 | | |
| 1132 | AAGGGAUGAAGAUCCUCACAAGG | 1281 | | IL4R:1152L21 antisense siNA | uuGuGAGGAucuucAucccTsT | 1531 |
| | | | | (1134C) stab05 | | |
| 3130 | UUGGGAAAUCGAUGAGAAAUUGA | 1282 | | IL4R:3150L21 antisense siNA | AAuuucucAucGAuuucccTsT | 1532 |
| | | | | (3132C) stab05 | | |
| 3131 | UGGGAAAUCGAUGAGAAAUUGAA | 1283 | | IL4R:3151L21 antisense siNA | cAAuuucucAucGAuuuccTsT | 1533 |
| | | | | (3133C) stab05 | | |
| 3169 | UCAUUGCCUAGAGGUGCUCAUUC | 1284 | | IL4R:3189L21 antisense siNA | AuGAGcAccucuAGGcAAuTsT | 1534 |
| | | | | (3171C) stab05 | | |
| 469 | CUAUACACUGGACCUGUGGGCUG | 1277 | | IL4R:471U21 sense siNA stab07 | B AuAcAcuGGAccuGuGGGcTT B | 1535 |
| 551 | CCAGGAAACCUGACAGUUCACAC | 1278 | | IL4R:553U21 sense siNA stab07 | B AGGAAAccuGAcAGuucAcTT B | 1536 |
| 1119 | AGCACAACAUGAAAAGGGAUGAA | 1279 | | IL4R:1121U21 sense siNA stab07 | B cAcAAcAuGAAAAGGGAuGTT B | 1537 |
| 1120 | GCACAACAUGAAAAGGGAUGAAG | 1280 | | IL4R:1122U21 sense siNA stab07 | B AcAAcAuGAAAAGGGAuGATT B | 1538 |
| 1132 | AAGGGAUGAAGAUCCUCACAAGG | 1281 | | IL4R:1134U21 sense siNA stab07 | B GGGAuGAAGAuccucAcAATT B | 1539 |
| 3130 | UUGGGAAAUCGAUGAGAAAUUGA | 1282 | | IL4R:3132U21 sense siNA stab07 | B GGGAAAucGAuGAGAAAuuTT B | 1540 |
| 3131 | UGGGAAAUCGAUGAGAAAUUGAA | 1283 | | IL4R:3133U21 sense siNA stab07 | B GGAAAucGAuGAGAAAuuGTT B | 1541 |
| 3169 | UCAUUGCCUAGAGGUGCUCAUUC | 1284 | | IL4R:3171U21 sense siNA stab07 | B AuuGccuAGAGGuGcucAuTT B | 1542 |
| 469 | CUAUACACUGGACCUGUGGGCUG | 1277 | | IL4R:489L21 antisense siNA | GcccAcAGGuccAGuGuAuTsT | 1543 |
| | | | | (471C) stab11 | | |
| 551 | CCAGGAAACCUGACAGUUCACAC | 1278 | | IL4R:571L21 antisense siNA | GuGAAcuGucAGGuuuccuTsT | 1544 |
| | | | | (553C) stab11 | | |
| 1119 | AGCACAACAUGAAAAGGGAUGAA | 1279 | | IL4R:1139L21 antisense siNA | cAucccuuuucAuGuuGuGTsT | 1545 |
| | | | | (1121C) stab11 | | |
| 1120 | GCACAACAUGAAAAGGGAUGAAG | 1280 | | IL4R:1140L21 antisense siNA | ucAucccuuuucAuGuuGuTsT | 1546 |
| | | | | (1122C) stab11 | | |
| 1132 | AAGGGAUGAAGAUCCUCACAAGG | 1281 | | IL4R:1152L21 antisense siNA | uuGuGAGGAucuucAucccTsT | 1547 |
| | | | | (1134C) stab11 | | |
| 3130 | UUGGGAAAUCGAUGAGAAAUUGA | 1282 | | IL4R:3150L21 antisense siNA | AAuuucucAucGAuuucccTsT | 1548 |
| | | | | (3132C) stab11 | | |
| 3131 | UGGGAAAUCGAUGAGAAAUUGAA | 1283 | | IL4R:3151L21 antisense siNA | cAAuuucucAucGAuuuccTsT | 1549 |
| | | | | (3133C) stab11 | | |
| 3169 | ucAuuGCCUAGAGGUGCUCAUUC | 1284 | | IL4R:3189L21 antisense siNA | AuGAGcAccucuAGGcAAuTsT | 1550 |
| | | | | (3171C) stab11 | | |
| 469 | CUAUACACUGGACCUGUGGGCUG | 1277 | | IL4R:471U21 sense siNA stab18 | B AuAcAcuGGAccuGuGGGcTT B | 1551 |
| 551 | CCAGGAAACCUGACAGUUCACAC | 1278 | | IL4R:553U21 sense siNA stab18 | B AGGAAAccuGAcAGuucAcTT B | 1552 |
| 1119 | AGCACAACAUGAAAAGGGAUGAA | 1279 | | IL4R:1121U21 sense siNA stab18 | B cAcAAcAuGAAAAGGGAuGTT B | 1553 |
| 1120 | GCACAACAUGAAAAGGGAUGAAG | 1280 | | IL4R:1122U21 sense siNA stab18 | B AcAAcAuGAAAAGGGAuGATT B | 1554 |
| 1132 | AAGGGAUGAAGAUCCUCACAAGG | 1281 | | IL4R:1134U21 sense siNA stab18 | B GGGAuGAAGAuccucAcAATT B | 1555 |
| 3130 | UUGGGAAAUCGAUGAGAAAUUGA | 1282 | | IL4R:3132U21 sense siNA stab18 | B GGGAAAucGAuGAGAAAuuTT B | 1556 |
| 3131 | UGGGAAAUCGAUGAGAAAUUGAA | 1283 | | IL4R:3133U21 sense siNA stab18 | B GGAAAucGAuGAGAAAuuGTT B | 1557 |
| 3169 | UCAUUGCCUAGAGGUGCUCAUUC | 1284 | | IL4R:3171U21 sense siNA stab18 | B AuuGccuAGAGGuGcucAuTT B | 1558 |
| 469 | CUAUACACUGGACCUGUGGGCUG | 1277 | | IL4R:489L21 antisense siNA | GcccAcAGGuccAGuGuAuTsT | 1559 |
| | | | | (471C) stab08 | | |
| 551 | CCAGGAAACCUGACAGUUCACAC | 1278 | | IL4R:571L21 antisense siNA | GuGAAcuGucAGGuuuccuTsT | 1560 |
| | | | | (553C) stab08 | | |
| 1119 | AGCACAACAUGAAAAGGGAUGAA | 1279 | | IL4R:1139L21 antisense siNA | cAucccuuuucAuGuuGuGTsT | 1561 |
| | | | | (1121C) stab08 | | |
| 1120 | GCACAACAUGAAAAGGGAUGAAG | 1280 | | IL4R:1140L21 antisense siNA | ucAucccuuuucAuGuuGuTsT | 1562 |
| | | | | (1122C) stab08 | | |
| 1132 | AAGGGAUGAAGAUCCUCACAAGG | 1281 | | IL4R:1152L21 antisense siNA | uuGuGAGGAucuucAucccTsT | 1563 |
| | | | | (1134C) stab08 | | |
| 3130 | UUGGGAAAUCGAUGAGAAAUUGA | 1282 | | IL4R:3150L21 antisense siNA | AAuuucucAucGAuuucccTsT | 1564 |
| | | | | (3132C) stab08 | | |
| 3131 | UGGGAAAUCGAUGAGAAAUUGAA | 1283 | | IL4R:3151L21 antisense siNA | cAAuuucucAucGAuuuccTsT | 1565 |
| | | | | (3133C) stab08 | | |
| 3169 | UCAUUGCCUAGAGGUGCUCAUUC | 1284 | | IL4R:3189L21 antisense siNA | AuGAGcAccucuAGGcAAuTsT | 1566 |
| | | | | (3171C) stab08 | | |
| 469 | CUAUACACUGGACCUGUGGGCUG | 1277 | 36729 | IL4R:471U21 sense siNA stab09 | B AUACACUGGACCUGUGGGCTT B | 1567 |
| 551 | CCAGGAAACCUGACAGUUCACAC | 1278 | 36730 | IL4R:553U21 sense siNA stab09 | B AGGAAACCUGACAGUUCACTT B | 1568 |
| 1119 | AGCACAACAUGAAAAGGGAUGAA | 1279 | 36731 | IL4R:1121U21 sense siNA stab09 | B CACAACAUGAAAAGGGAUGTT B | 1569 |
| 1120 | GCACAACAUGAAAAGGGAUGAAG | 1280 | 36732 | IL4R:1122U21 sense siNA stab09 | B ACAACAUGAAAAGGGAUGATT B | 1570 |
| 1132 | AAGGGAUGAAGAUCCUCACAAGG | 1281 | 36733 | IL4R:1134U21 sense siNA stab09 | B GGGAUGAAGAUCCUCACAATT B | 1571 |
| 3130 | UUGGGAAAUCGAUGAGAAAUUGA | 1282 | 36734 | IL4R:3132U21 sense siNA stab09 | B GGGAAAUCGAUGAGAAAUUTT B | 1572 |
| 3131 | UGGGAAAUCGAUGAGAAAUUGAA | 1283 | 36735 | IL4R:3133U21 sense siNA stab09 | B GGAAAUCGAUGAGAAAUUGTT B | 1573 |
| 3169 | UCAUUGCCUAGAGGUGCUCAUUC | 1284 | 36736 | IL4R:3171U21 sense siNA stab09 | B AUUGCCUAGAGGUGCUCAUTT B | 1574 |
| 469 | CUAUACACUGGACCUGUGGGCUG | 1277 | | IL4R:489L21 antisense siNA | GCCCACAGGUCCAGUGUAUTsT | 1575 |
| | | | | (471C) stab10 | | |
| 551 | CCAGGAAACCUGACAGUUCACAC | 1278 | | IL4R:571L21 antisense siNA | GUGAACUGUCAGGUUUCCUTsT | 1576 |
| | | | | (553C) stab10 | | |
| 1119 | AGCACAACAUGAAAAGGGAUGAA | 1279 | | IL4R:1139L21 antisense siNA | CAUCCCUUUUCAUGUUGUGTsT | 1577 |
| | | | | (1121C) stab10 | | |
| 1120 | GCACAACAUGAAAAGGGAUGAAG | 1280 | | IL4R:1140L21 antisense siNA | UCAUCCCUUUUCAUGUUGUTsT | 1578 |
| | | | | (1122C) stab10 | | |
| 1132 | AAGGGAUGAAGAUCCUCACAAGG | 1281 | | IL4R:1152L21 antisense siNA | UUGUGAGGAUCUUCAUCCCTsT | 1579 |
| | | | | (1134C) stab10 | | |
| 3130 | UUGGGAAAUCGAUGAGAAAUUGA | 1282 | | IL4R:3150L21 antisense siNA | AAUUUCUCAUCGAUUUCCCTsT | 1580 |
| | | | | (3132C) stab10 | | |
| 3131 | UGGGAAAUCGAUGAGAAAUUGAA | 1283 | | IL4R:3151L21 antisense siNA | CAAUUUCUCAUCGAUUUCCTsT | 1581 |
| | | | | (3133C) stab10 | | |
| 3169 | UCAUUGCCUAGAGGUGCUCAUUC | 1284 | | IL4R:3189L21 antisense siNA | AUGAGCACCUCUAGGCAAUTsT | 1582 |
| | | | | (3171C) stab10 | | |
| 469C | UAUACACUGGACCUGUGGGCUG | 1277 | 36737 | IL4R:489L21 antisense siNA | GcccAcAGGuccAGuGuAuTT B | 1583 |
| | | | | (471C) stab19 | | |
| 5510 | CAGGAAACCUGACAGUUCACAC | 1278 | 36738 | IL4R:571L21 antisense siNA | GuGAAcuGucAGGuuuccuTT B | 1584 |
| | | | | (553C) stab19 | | |
| 1119 | AGcACAACAUGAAAAGGGAUGAA | 1279 | 36739 | IL4R:1139L21 antisense siNA | cAucccuuuucAuGuuGuGTT B | 1585 |
| | | | | (1121C) stab19 | | |
| 1120 | GCACAACAUGAAAAGGGAUGAAG | 1280 | 36740 | IL4R:1140L21 antisense siNA | ucAucccuuuucAuGuuGuTT B | 1586 |
| | | | | (1122C) stab19 | | |
| 1132 | AAGGGAUGAAGAUCCUCACAAGG | 1281 | 36741 | IL4R:1152L21 antisense siNA | uuGuGAGGAucuucAucccTT B | 1587 |
| | | | | (1134C) stab19 | | |
| 3130 | UUGGGAAAUCGAUGAGAAAUUGA | 1282 | 36742 | IL4R:3150L21 antisense siNA | AAuuucucAucGAuuucccTT B | 1588 |
| | | | | (3132C) stab19 | | |
| 3131 | UGGGAAAUCGAUGAGAAAUUGAA | 1283 | 36743 | IL4R:3151L21 antisense siNA | cAAuuucucAucGAuuuccTT B | 1589 |
| | | | | (3133C) stab19 | | |
| 3169 | UCAUUGCCUAGAGGUGCUCAUUC | 1284 | 36744 | IL4R:3189L21 antisense siNA | AuGAGcAccucuAGGcAAuTT B | 1590 |
| | | | | (3171C) stab19 | | |
| 469 | CUAUACACUGGACCUGUGGGCUG | 1277 | 36745 | IL4R:489L21 antisense siNA | GCCCACAGGUCCAGUGUAUTT B | 1591 |
| | | | | (471C) stab22 | | |
| 551 | CCAGGAAACCUGACAGUUCACAC | 1278 | 36746 | IL4R:571L21 antisense siNA | GUGAACUGUCAGGUUUCCUTT B | 1592 |
| | | | | (553C) stab22 | | |
| 1119 | AGCACAACAUGAAAAGGGAUGAA | 1279 | 36747 | IL4R:1139L21 antisense siNA | CAUCCCUUUUCAUGUUGUGTT B | 1593 |
| | | | | (1121C) stab22 | | |
| 1120 | GCACAACAUGAAAAGGGAUGAAG | 1280 | 36748 | IL4R:1140L21 antisense siNA | UCAUCCCUUUUCAUGUUGUTT B | 1594 |
| | | | | (1122C) stab22 | | |
| 1132 | AAGGGAUGAAGAUCCUCACAAGG | 1281 | 36749 | IL4R:1152L21 antisense siNA | UUGUGAGGAUCUUCAUCCCTT B | 1595 |
| | | | | (1134C) stab22 | | |
| 3130 | UUGGGAAAUCGAUGAGAAAUUGA | 1282 | 36750 | IL4R:3150L21 antisense siNA | AAUUUCUCAUCGAUUUCCCTT B | 1596 |
| | | | | (3132C) stab22 | | |
| 3131 | UGGGAAAUCGAUGAGAAAUUGAA | 1283 | 36751 | IL4R:3151L21 antisense siNA | CAAUUUCUCAUCGAUUUCCTT B | 1597 |
| | | | | (3133C) stab22 | | |
| 3169 | UCAUUGCCUAGAGGUGCUCAUUC | 1284 | 36752 | IL4R:3189L21 antisense siNA | AUGAGCACCUCUAGGCAAUTT B | 1598 |
| | | | | (3171C) stab22 | | |

IL13

Tar-

| | | | |
|---|---|---|---|
| get | Seq | Cmpd | Seq |

| | | | | | | |
|---|---|---|---|---|---|---|
| Pos | Target | ID | # | Aliases | Sequence | ID |

| | | | | | | |
|---|---|---|---|---|---|---|
| 391 | CCCAGUUUGUAAAGGACCUGCUC | 1285 | | IL13:393U21 sense siNA | CAGUUUGUAAAGGACCUGCTT | 1599 |
| 797 | CACUUCACACACAGGCAACUGAG | 1286 | | IL13:799U21 sense siNA | CUUCACACACAGGCAACUGTT | 1600 |
| 832 | UCAGGCACACUUCUUCUUGGUCU | 1287 | | IL13:834U21 sense siNA | AGGCACACUUCUUCUUGGUTT | 1601 |
| 911 | AAGACUGUGGCUGCUAGCACUUG | 1288 | | IL13:913U21 sense siNA | GACUGUGGCUGCUAGCACUTT | 1602 |
| 963 | AGCACUAAAGCAGUGGACACCAG | 1289 | | IL13:965U21 sense siNA | CACUAAAGCAGUGGACACCTT | 1603 |
| 965 | CACUAAAGCAGUGGACACCAGGA | 1290 | | IL13:967U21 sense siNA | CUAAAGCAGUGGACACCAGTT | 1604 |
| 968 | UAAAGCAGUGGACACCAGGAGUC | 1291 | | IL13:970U21 sense siNA | AAGCAGUGGACACCAGGAGTT | 1605 |
| 1191 | AGAAGGGUACCUUGAACACUGGG | 1292 | | IL13:1193U21 sense siNA | AAGGGUACCUUGAACACUGTT | 1606 |
| 391 | CCCAGUUUGUAAAGGACCUGCUC | 1285 | | IL13:411L21 antisense siNA | GCAGGUCCUUUACAAACUGTT | 1607 |
| | | | | (393C) | | |
| 797 | CACUUCACACACAGGCAACUGAG | 1286 | | IL13:817L21 antisense siNA | CAGUUGCCUGUGUGUGAAGTT | 1608 |
| | | | | (799C) | | |
| 832 | UCAGGCACACUUCUUCUUGGUCU | 1287 | | IL13:852L21 antisense siNA | ACCAAGAAGAAGUGUGCCUTT | 1609 |
| | | | | (834C) | | |
| 911 | AAGACUGUGGCUGCUAGCACUUG | 1288 | | IL13:931L21 antisense siNA | AGUGCUAGCAGCCACAGUCTT | 1610 |
| | | | | (913C) | | |
| 963 | AGCACUAAAGCAGUGGACACCAG | 1289 | | IL13:983L21 antisense siNA | GGUGUCCACUGCUUUAGUGTT | 1611 |
| | | | | (965C) | | |
| 965 | CACUAAAGCAGUGGACACCAGGA | 1290 | | IL13:985L21 antisense siNA | CUGGUGUCCACUGCUUUAGTT | 1612 |
| | | | | (967C) | | |
| 968 | UAAAGCAGUGGACACCAGGAGUC | 1291 | | IL13:988L21 antisense siNA | CUCCUGGUGUCCACUGCUUTT | 1613 |
| | | | | (970C) | | |
| 1191 | AGAAGGGUACCUUGAACACUGGG | 1292 | | IL13:1211L21 antisense siNA | CAGUGUUCAAGGUACCCUUTT | 1614 |
| | | | | (1193C) | | |
| 391 | CCCAGUUUGUAAAGGACCUGCUC | 1285 | | IL13:393U21 sense siNA stab04 | B cAGuuuGuAAAGGAccuGcTT B | 1615 |
| 797 | CACUUCACACACAGGCAACUGAG | 1286 | | IL13:799U21 sense siNA stab04 | B cuucAcAcAcAGGcAAcuGTT B | 1616 |
| 832 | UCAGGCACACUUCUUCUUGGUCU | 1287 | | IL13:834U21 sense siNA stab04 | B AGGcAcAcuucuucuuGGuTT B | 1617 |
| 911 | AAGACUGUGGCUGCUAGCACUUG | 1288 | | IL13:913U21 sense siNA stab04 | B GAcuGuGGcuGcuAGcAcuTT B | 1618 |
| 963 | AGCACUAAAGCAGUGGACACCAG | 1289 | | IL13:965U21 sense siNA stab04 | B cAcuAAAGcAGuGGAcAccTT B | 1619 |
| 965 | CACUAAAGCAGUGGACACCAGGA | 1290 | | IL13:967U21 sense siNA stab04 | B cuAAAGcAGuGGAcAccAGTT B | 1620 |
| 968 | UAAAGCAGUGGACACCAGGAGUC | 1291 | | IL13:970U21 sense siNA stab04 | B AAGcAGuGGAcAccAGGAGTT B | 1621 |
| 1191 | AGAAGGGUACCUUGAACACUGGG | 1292 | | IL13:1193U21 sense siNA stab04 | B AAGGGuAccuuGAAcAcuGTT B | 1622 |
| 391 | CCCAGUUUGUAAAGGACCUGCUC | 1285 | | IL13:411L21 antisense siNA | GcAGGuccuuuAcAAAcuGTsT | 1623 |
| | | | | (393C) stab05 | | |
| 797 | CACUUCACACACAGGCAACUGAG | 1286 | | IL13:817L21 antisense siNA | cAGuuGccuGuGuGuGAAGTsT | 1624 |
| | | | | (799C) stab05 | | |
| 832 | UCAGGCACACUUCUUCUUGGUCU | 1287 | | IL13:852L21 antisense siNA | AccAAGAAGAAGuGuGccuTsT | 1625 |
| | | | | (834C) stab05 | | |
| 911 | AAGACUGUGGCUGCUAGCACUUG | 1288 | | IL13:931L21 antisense siNA | AGuGcuAGcAGccAcAGucTsT | 1626 |
| | | | | (913C) stab05 | | |
| 963 | AGCACUAAAGCAGUGGACACCAG | 1289 | | IL13:983L21 antisense siNA | GGuGuccAcuGcuuuAGuGTsT | 1627 |
| | | | | (965C) stab05 | | |
| 965 | CACUAAAGCAGUGGACACCAGGA | 1290 | | IL13:985L21 antisense siNA | cuGGuGuccAcuGcuuuAGTsT | 1628 |
| | | | | (967C) stab05 | | |
| 968 | UAAAGCAGUGGACACCAGGAGUC | 1291 | | IL13:988L21 antisense siNA | cuccuGGuGuccAcuGcuuTsT | 1629 |
| | | | | (970C) stab05 | | |
| 1191 | AGAAGGGUACCUUGAACACUGGG | 1292 | | IL13:1211L21 antisense siNA | cAGuGuucAAGGuAcccuuTsT | 1630 |
| | | | | (1193C) stab05 | | |
| 864 | UAUUGUGUGUUAUUUAAAUGAGU | 1293 | 33355 | IL13:864U21 sense siNA stab07 | B uuGuGuGuuAuuuAAAuGATT B | 1631 |
| 865 | AUUGUGUGUUAUUUAAAUGAGUG | 1294 | 33356 | IL13:865U21 sense siNA stab07 | B uGuGuGuuAuuuAAAuGAGTT B | 1632 |
| 866 | UUGUGUGUUAUUUAAAUGAGUGU | 1295 | 33357 | IL13:866U21 sense siNA stab07 | B GuGuGuuAuuuAAAuGAGuTT B | 1633 |
| 863 | UUAUUGUGUGUUAUUUAAAUGAG | 1296 | 33358 | IL13:863U21 sense siNA stab07 | B AuuGuGuGuuAuuuAAAuGTT B | 1634 |
| 200 | UGCAAUGGCAGCAUGGUAUGGAG | 1297 | 33359 | IL13:200U21 sense siNA stab07 | B cAAuGGcAGcAuGGuAuGGTT B | 1635 |
| 201 | GCAAUGGCAGCAUGGUAUGGAGC | 1298 | 33360 | IL13:201U21 sense siNA stab07 | B AAuGGcAGcAuGGuAuGGATT B | 1636 |
| 202 | CAAUGGCAGCAUGGUAUGGAGCA | 1299 | 33361 | IL13:202U21 sense siNA stab07 | B AuGGcAGcAuGGuAuGGAGTT B | 1637 |
| 860 | UUAUUAUUGUGUGUUAUUUAAAU | 1300 | 33362 | IL13:860U21 sense siNA stab07 | B AuuAuuGuGuGuuAuuuAATT B | 1638 |
| 861 | UAUUAUUGUGUGUUAUUUAAAUG | 1301 | 33363 | IL13:861U21 sense siNA stab07 | B uuAuuGuGuGuuAuuuAAATT B | 1639 |
| 862 | AUUAUUGUGUGUUAUUUAAAUGA | 1302 | 33364 | IL13:862U21 sense siNA stab07 | B uAuuGuGuGuuAuuuAAAuTT B | 1640 |
| 391 | CCCAGUUUGUAAAGGACCUGCUC | 1285 | | IL13:393U21 sense siNA stab07 | B cAGuuuGuAAAGGAccuGcTT B | 1641 |
| 797 | CACUUCACACACAGGCAACUGAG | 1286 | | IL13:799U21 sense siNA stab07 | B cuucAcAcAcAGGcAAcuGTT B | 1642 |
| 832 | UCAGGCACACUUCUUCUUGGUCU | 1287 | | IL13:834U21 sense siNA stab07 | B AGGcAcAcuucuucuuGGuTT B | 1643 |
| 911 | AAGACUGUGGCUGCUAGCACUUG | 1288 | | IL13:913U21 sense siNA stab07 | B GAcuGuGGcuGcuAGcAcuTT B | 1644 |
| 963 | AGCACUAAAGCAGUGGACACCAG | 1289 | | IL13:965U21 sense siNA stab07 | B cAcuAAAGcAGuGGAcAccTT B | 1645 |
| 965 | CACUAAAGCAGUGGACACCAGGA | 1290 | | IL13:967U21 sense siNA stab07 | B cuAAAGcAGuGGAcAccAGTT B | 1646 |
| 968 | UAAAGCAGUGGACACCAGGAGUC | 1291 | | IL13:970U21 sense siNA stab07 | B AAGcAGuGGAcAccAGGAGTT B | 1647 |
| 1191 | AGAAGGGUACCUUGAACACUGGG | 1292 | | IL13:1193U21 sense siNA stab07 | B AAGGGuAccuuGAAcAcuGTT B | 1648 |
| 391 | CCCAGUUUGUAAAGGACCUGCUC | 1285 | | IL13:411L21 antisense siNA | GcAGGuccuuuAcAAAcuGTsT | 1649 |
| | | | | (393C) stab11 | | |
| 797 | CACUUCACACACAGGCAACUGAG | 1286 | | IL13:817L21 antisense siNA | cAGuuGccuGuGuGuGAAGTsT | 1650 |
| | | | | (799C) stab11 | | |
| 832 | UCAGGCACACUUCUUCUUGGUCU | 1287 | | IL13:852L21 antisense siNA | AcCAAGAAGAAGuGuGccuTsT | 1651 |
| | | | | (834C) stab11 | | |
| 911 | AAGACUGUGGCUGCUAGCACUUG | 1288 | | IL13:931L21 antisense siNA | AGuGcuAGcAGccAcAGucTsT | 1652 |
| | | | | (913C) stab11 | | |
| 963 | AGCACUAAAGCAGUGGACACCAG | 1289 | | IL13:983L21 antisense siNA | GGuGuccAcuGcuuuAGuGTsT | 1653 |
| | | | | (965C) stab11 | | |
| 965 | CACUAAAGCAGUGGACACCAGGA | 1290 | | IL13:985L21 antisense siNA | cuGGuGuccAcuGcuuuAGTsT | 1654 |
| | | | | (967C) stab11 | | |
| 968 | UAAAGCAGUGGACACCAGGAGUC | 1291 | | IL13:988L21 antisense siNA | cuccuGGuGuccAcuGcuuTsT | 1655 |
| | | | | (970C) stab11 | | |
| 1191 | AGAAGGGUACCUUGAACACUGGG | 1292 | | IL13:1211L21 antisense siNA | cAGuGuucAAGGuAcccuuTsT | 1656 |
| | | | | (1193C) stab11 | | |
| 391 | CCCAGUUUGUAAAGGACCUGCUC | 1285 | | IL13:393U21 sense siNA stab18 | B cAGuuuGuAAAGGAccuGcTT B | 1657 |
| 797 | CACUUCACACACAGGCAACUGAG | 1286 | | IL13:799U21 sense siNA stab18 | B cuucAcAcAcAGGcAAcuGTT B | 1658 |
| 832 | UCAGGCACACUUCUUCUUGGUCU | 1287 | | IL13:834U21 sense siNA stab18 | B AGGcAcAcuucuucuuGGuTT B | 1659 |
| 911 | AAGACUGUGGCUGCUAGCACUUG | 1288 | | IL13:913U21 sense siNA stab18 | B GAcuGuGGcuGcuAGcAcuTT B | 1660 |
| 963 | AGCACUAAAGCAGUGGACACCAG | 1289 | | IL13:965U21 sense siNA stab18 | B cAcuAAAGcAGuGGAcAccTT B | 1661 |
| 965 | CACUAAAGCAGUGGACACCAGGA | 1290 | | IL13:967U21 sense siNA stab18 | B cuAAAGcAGuGGAcAccAGTT B | 1662 |
| 968 | UAAAGCAGUGGACACCAGGAGUC | 1291 | | IL13:970U21 sense siNA stab18 | B AAGcAGuGGAcAccAGGAGTT B | 1663 |
| 1191 | AGAAGGGUACCUUGAACACUGGG | 1292 | | IL13:1193U21 sense siNA stab18 | B AAGGGuAccuuGAAcAcuGTT B | 1664 |
| 864 | UAUUGUGUGUUAUUUAAAUGAGU | 1293 | 33375 | IL13:882L21 antisense siNA | ucAuuuAAAuAAcAcAcAATsT | 1665 |
| | | | | (864C) stab08 | | |
| 865 | AUUGUGUGUUAUUUAAAUGAGUG | 1294 | 33376 | IL13:883L21 antisense siNA | cucAuuuAAAuAAcAcAcATsT | 1666 |
| | | | | (865C) stab08 | | |
| 866 | UUGUGUGUUAUUUAAAUGAGUGU | 1295 | 33377 | IL13:884L21 antisense siNA | AcucAuuuAAAuAAcAcAcTsT | 1667 |
| | | | | (866C) stab08 | | |
| 863 | UUAUUGUGUGUUAUUUAAAUGAG | 1296 | 33378 | IL13:881L21 antisense siNA | cAuuuAAAuAAcAcAcAAuTsT | 1668 |
| | | | | (863C) stab08 | | |
| 200 | UGCAAUGGCAGCAUGGUAUGGAG | 1297 | 33379 | IL13:218L21 antisense siNA | ccAuAccAuGcuGccAuuGTsT | 1669 |
| | | | | (200C) stab08 | | |
| 201 | GCAAUGGCAGCAUGGUAUGGAGC | 1298 | 33380 | IL13:219L21 antisense siNA | uccAuAccAuGcuGccAuuTsT | 1670 |
| | | | | (201C) stab08 | | |
| 202 | CAAUGGCAGCAUGGUAUGGAGCA | 1299 | 33381 | IL13:220L21 antisense siNA | cuccAuAccAuGcuGccAuTsT | 1671 |
| | | | | (202C) stab08 | | |
| 860 | UUAUUAUUGUGUGUUAUUUAAAU | 1300 | 33382 | IL13:878L21 antisense siNA | uuAAAuAAcAcAcAAuAAuTsT | 1672 |
| | | | | (860C) stab08 | | |
| 861 | UAUUAUUGUGUGUUAUUUAAAUG | 1301 | 33383 | IL13:879L21 antisense siNA | uuuAAAuAAcAcAcAAuAATsT | 1673 |
| | | | | (861C) stab08 | | |
| 862 | AUUAUUGUGUGUUAUUUAAAUGA | 1302 | 33384 | IL13:880L21 antisense siNA | AuuuAAAuAAcAcAcAAuATsT | 1674 |
| | | | | (862C) stab08 | | |
| 391 | CCCAGUUUGUAAAGGACCUGCUC | 1285 | | IL13:411L21 antisense siNA | GcAGGuccuuuAcAAAcuGTsT | 1675 |
| | | | | (393C) stab08 | | |
| 797 | CACUUCACACACAGGCAACUGAG | 1286 | | IL13:817L21 antisense siNA | cAGuuGccuGuGuGuGAAGTsT | 1676 |
| | | | | (799C) stab08 | | |
| 832 | UCAGGCACACUUCUUCUUGGUCU | 1287 | | IL13:852L21 antisense siNA | AccAAGAAGAAGuGuGccuTsT | 1677 |
| | | | | (834C) stab08 | | |
| 911 | AAGACUGUGGCUGCUAGCACUUG | 1288 | | IL13:931L21 antisense siNA | AGuGcuAGcAGccAcAGucTsT | 1678 |
| | | | | (913C) stab08 | | |
| 963 | AGCACUAAAGCAGUGGACACCAG | 1289 | | IL13:983L21 antisense siNA | GGuGuccAcuGcuuuAGuGTsT | 1679 |
| | | | | (965C) stab08 | | |
| 965 | CACUAAAGCAGUGGACACCAGGA | 1290 | | IL13:985L21 antisense siNA | cuGGuGuccAcuGcuuuAGTsT | 1680 |
| | | | | (967C) stab08 | | |
| 968 | UAAAGCAGUGGACACCAGGAGUC | 1291 | | IL13:988L21 antisense siNA | cuccuGGuGuccAcuGcuuTsT | 1681 |
| | | | | (970C) stab08 | | |
| 1191 | AGAAGGGUACCUUGAACACUGGG | 1292 | | IL13:1211L21 antisense siNA | cAGuGuucAAGGuAcccuuTsT | 1682 |
| | | | | (1193C) stab08 | | |
| 391 | CCCAGUUUGUAAAGGACCUGCUC | 1285 | 36890 | IL13:393U21 sense siNA stab09 | B CAGUUUGUAAAGGACCUGCTT B | 1683 |
| 797 | CACUUCACACACAGGCAACUGAG | 1286 | 36891 | IL13:799U21 sense siNA stab09 | B CUUCACACACAGGCAACUGTT B | 1684 |
| 832 | UCAGGCACACUUCUUCUUGGUCU | 1287 | 36892 | IL13:834U21 sense siNA stab09 | B AGGCACACUUCUUCUUGGUTT B | 1685 |
| 911 | AAGACUGUGGCUGCUAGCACUUG | 1288 | 36893 | IL13:913U21 sense siNA stab09 | B GACUGUGGCUGCUAGCACUTT B | 1686 |
| 963 | AGCACUAAAGCAGUGGACACCAG | 1289 | 36894 | IL13:965U21 sense siNA stab09 | B CACUAAAGCAGUGGACACCTT B | 1687 |
| 965 | CACUAAAGCAGUGGACACCAGGA | 1290 | 36895 | IL13:967U21 sense siNA stab09 | B CUAAAGCAGUGGACACCAGTT B | 1688 |
| 968 | UAAAGCAGUGGACACCAGGAGUC | 1291 | 36896 | IL13:970U21 sense siNA stab09 | B AAGCAGUGGACACCAGGAGTT B | 1689 |
| 1191 | AGAAGGGUACCUUGAACACUGGG | 1292 | 36897 | IL13:1193U21 sense siNA stab09 | B AAGGGUACCUUGAACACUGTT B | 1690 |
| 391 | CCCAGUUUGUAAAGGACCUGCUC | 1285 | | IL13:411L21 antisense siNA | GCAGGUCCUUUACAAACUGTsT | 1691 |
| | | | | (393C) stab10 | | |
| 797 | CACUUCACACACAGGCAACUGAG | 1286 | | IL13:817L21 antisense siNA | CAGUUGCCUGUGUGUGAAGTsT | 1692 |
| | | | | (799C) stab10 | | |
| 832 | UCAGGCACACUUCUUCUUGGUCU | 1287 | | IL13:852L21 antisense siNA | ACCAAGAAGAAGUGUGCCUTsT | 1693 |
| | | | | (834C) stab10 | | |
| 911 | AAGACUGUGGCUGCUAGCACUUG | 1288 | | IL13:931L21 antisense siNA | AGUGCUAGCAGCCACAGUCTsT | 1694 |
| | | | | (913C) stab10 | | |
| 963 | AGCACUAAAGCAGUGGACACCAG | 1289 | | IL13:983L21 antisense siNA | GGUGUCCACUGCUUUAGUGTsT | 1695 |
| | | | | (965C) stab10 | | |
| 965 | CACUAAAGCAGUGGACACCAGGA | 1290 | | IL13:985L21 antisense sNA | CUGGUGUCCACUGCUUUAGTsT | 1696 |
| | | | | (967C) stab10 | | |
| 968 | UAAAGCAGUGGACACCAGGAGUC | 1291 | | IL13:988L21 antisense siNA | CUCCUGGUGUCCACUGCUUTsT | 1697 |
| | | | | (970C) stab10 | | |
| 1191 | AGAAGGGUACCUUGAACACUGGG | 1292 | | IL13:1211L21 antisense siNA | CAGUGUUCAAGGUACCCUUTsT | 1698 |
| | | | | (1193C) stab10 | | |
| 391 | CCCAGUUUGUAAAGGACCUGCUC | 1285 | | IL13:411L21 antisense siNA | GcAGGuccuuuAcAAAcuGTT B | 1699 |
| | | | | (393C) stab19 | | |
| 797 | CACUUCACACACAGGCAACUGAG | 1286 | | IL13:817L21 antisense siNA | cAGuuGccuGuGuGuGAAGTT B | 1700 |
| | | | | (799C) stab19 | | |
| 832 | UCAGGCACACUUCUUCUUGGUCU | 1287 | | IL13:852L21 antisense siNA | AccAAGAAGAAGuGuGccuTT B | 1701 |
| | | | | (834C) stab19 | | |
| 911 | AAGACUGUGGCUGCUAGCACUUG | 1288 | | IL13:931L21 antisense siNA | AGuGCuAGcAGccAcAGucTT B | 1702 |
| | | | | (913C) stab19 | | |
| 963 | AGCACUAAAGCAGUGGACACCAG | 1289 | | IL13:983L21 antisense siNA | GGuGuccAcuGcuuuAGuGTT B | 1703 |
| | | | | (965C) stab19 | | |
| 965 | CACUAAAGCAGUGGACACCAGGA | 1290 | | IL13:985L21 antisense siNA | cuGGuGuccAcuGcuuuAGTT B | 1704 |
| | | | | (967C) stab19 | | |
| 968 | UAAAGCAGUGGACACCAGGAGUC | 1291 | | IL13:988L21 antisense siNA | cuccuGGuGuccAcuGcuuTT B | 1705 |
| | | | | (970C) stab19 | | |
| 1191 | AGAAGGGUACCUUGAACACUGGG | 1292 | | IL13:1211L21 antisense siNA | cAGuGuucAAGGuAcccuuTT B | 1706 |
| | | | | (1193C) stab19 | | |
| 391 | CCCAGUUUGUAAAGGACCUGCUC | 1285 | 36898 | IL13:411L21 antisense siNA | GCAGGUCCUUUACAAACUGTT B | 1707 |
| | | | | (393C) stab22 | | |
| 797 | CACUUCACACACAGGCAACUGAG | 1286 | 36899 | IL13:817L21 antisense siNA | CAGUUGCCUGUGUGUGAAGTT B | 1708 |
| | | | | (799C) stab22 | | |
| 832 | UCAGGCACACUUCUUCUUGGUCU | 1287 | 36900 | IL13:852L21 antisense siNA | ACCAAGAAGAAGUGUGCCUTT B | 1709 |
| | | | | (834C) stab22 | | |
| 911 | AAGACUGUGGCUGCUAGCACUUG | 1288 | 36901 | IL13:931L21 antisense siNA | AGUGCUAGCAGCCACAGUCTT B | 1710 |
| | | | | (913C) stab22 | | |
| 963 | AGCACUAAAGCAGUGGACACCAG | 1289 | 36902 | IL13:983L21 antisense siNA | GGUGUCCACUGCUUUAGUGTT B | 1711 |
| | | | | (965C) stab22 | | |
| 965 | CACUAAAGCAGUGGACACCAGGA | 1290 | 36903 | IL13:985L21 antisense siNA | CUGGUGUCCACUGCUUUAGTT B | 1712 |
| | | | | (967C) stab22 | | |
| 968 | UAAAGCAGUGGACACCAGGAGUC | 1291 | 36904 | IL13:988L21 antisense siNA | CUCCUGGUGUCCACUGCUUTT B | 1713 |
| | | | | (970C) stab22 | | |
| 1191 | AGAAGGGUACCUUGAACACUGGG | 1292 | 36905 | IL13:1211L21 antisense siNA | CAGUGUUCAAGGUACCCUUTT B | 1714 |
| | | | | (1193C) stab22 | | |

IL13R

Tar-

| | | | |
|---|---|---|---|
| get | Seq | Cmpd | Seq |

| | | | | | | |
|---|---|---|---|---|---|---|
| Pos | Target | ID | # | Aliases | Sequence | ID |

| | | | | | | |
|---|---|---|---|---|---|---|
| 408 | AAGGUGAUCCUGAGUCUGCUGUG | 1303 | | IL13RA1:410U21 sense siNA | GGUGAUCCUGAGUCUGCUGTT | 1715 |
| 657 | UGGUCAAGGAUAAUGCAGGAAAA | 1304 | | IL13RA1:659U21 sense siNA | GUCAAGGAUAAUGCAGGAATT | 1716 |
| 871 | CGUCCAAGAGGCUAAAUGUGAGA | 1305 | | IL13RA1:873U21 sense siNA | UCCAAGAGGCUAAAUGUGATT | 1717 |
| 1276 | GGAAACCGACUCUGUAGUGCUGA | 1306 | | IL13RA1:1278U21 sense siNA | AAACCGACUCUGUAGUGCUTT | 1718 |
| 1308 | UGAAGAAAGCCUCUCAGUGAUGG | 1307 | | IL13RA1:1310U21 sense siNA | AAGAAAGCCUCUCAGUGAUTT | 1719 |
| 1424 | ACUGCACCAUUUAAAAACAGGCA | 1308 | | IL13RA1:1426U21 sense siNA | UGCACCAUUUAAAAACAGGTT | 1720 |
| 2186 | CAGCAUUUUCCUCUGCUUUGAAA | 1309 | | IL13RA1:2188U21 sense siNA | GCAUUUUCCUCUGCUUUGATT | 1721 |
| 2270 | CCAAGACCUUUCAAAGCCAUUUU | 1310 | | IL13RA1:2272U21 sense siNA | AAGACCUUUCAAAGCCAUUTT | 1722 |
| 408 | AAGGUGAUCCUGAGUCUGCUGUG | 1303 | | IL13RA1:428L21 antisense siNA | CAGCAGACUCAGGAUCACCTT | 1723 |
| | | | | (410C) | | |
| 657 | UGGUCAAGGAUAAUGCAGGAAAA | 1304 | | IL13RA1:677L21 antisense siNA | UUCCUGCAUUAUCCUUGACTT | 1724 |
| | | | | (659C) | | |
| 871 | CGUCCAAGAGGCUAAAUGUGAGA | 1305 | | IL13RA1:891L21 antisense siNA | UCACAUUUAGCCUCUUGGATT | 1725 |
| | | | | (873C) | | |
| 1276 | GGAAACCGACUCUGUAGUGCUGA | 1306 | | IL13RA1:1296L21 antisense siNA | AGCACUACAGAGUCGGUUUTT | 1726 |
| | | | | (1278C) | | |
| 1308 | UGAAGAAAGCCUCUCAGUGAUGG | 1307 | | IL13RA1:1328L21 antisense siNA | AUCACUGAGAGGCUUUCUUTT | 1727 |
| | | | | (1310C) | | |
| 1424 | ACUGCACCAUUUAAAAACAGGCA | 1308 | | IL13RA1:1444L21 antisense siNA | CCUGUUUUUAAAUGGUGCATT | 1728 |
| | | | | (1426C) | | |
| 2186 | CAGCAUUUUCCUCUGCUUUGAAA | 1309 | | IL13RA1:2206L21 antisense siNA | UCAAAGCAGAGGAAAAUGCTT | 1729 |
| | | | | (2188C) | | |
| 2270 | CCAAGACCUUUCAAAGCCAUUUU | 1310 | | IL13RA1:2290L21 antisense siNA | AAUGGCUUUGAAAGGUCUUTT | 1730 |
| | | | | (2272C) | | |
| 408 | AAGGUGAUCCUGAGUCUGCUGUG | 1303 | | IL13RA1:410U21 sense siNA | B GGuGAuccuGAGucuGcuGTT B | 1731 |
| | | | | stab04 | | |
| 657 | UGGUCAAGGAUAAUGCAGGAAAA | 1304 | | IL13RA1:659U21 sense siNA | B GucAAGGAuAAuGcAGGAATT B | 1732 |
| | | | | stab04 | | |
| 871 | CGUCCAAGAGGCUAAAUGUGAGA | 1305 | | IL13RA1:873U21 sense siNA | B uccAAGAGGcuAAAuGuGATT B | 1733 |
| | | | | stab04 | | |
| 1276 | GGAAACCGACUCUGUAGUGCUGA | 1306 | | IL13RA1:1278U21 sense siNA | B AAAccGAcucuGuAGuGcuTT B | 1734 |
| | | | | stab04 | | |
| 1308 | UGAAGAAAGCCUCUCAGUGAUGG | 1307 | | IL13RA1:1310U21 sense siNA | B AAGAAAGccucucAGuGAuTT B | 1735 |
| | | | | stab04 | | |
| 1424 | ACUGCACCAUUUAAAAACAGGCA | 1308 | | IL13RA1:1426U21 sense siNA | B uGcAccAuuuAAAAAcAGGTT B | 1736 |
| | | | | stab04 | | |
| 2186 | CAGCAUUUUCCUCUGCUUUGAAA | 1309 | | IL13RA1:2188U21 sense siNA | B GcAuuuuccucuGcuuuGATT B | 1737 |
| | | | | stab04 | | |
| 2270 | CCAAGACCUUUCAAAGCCAUUUU | 1310 | | IL13RA1:2272U21 sense siNA | B AAGAccuuucAAAGccAuuTT B | 1738 |
| | | | | stab04 | | |
| 408 | AAGGUGAUCCUGAGUCUGCUGUG | 1303 | | IL13RA1:428L21 antisense siNA | cAGcAGAcucAGGAucAccTsT | 1739 |
| | | | | (410C) stab05 | | |
| 657 | UGGUCAAGGAUAAUGCAGGAAAA | 1304 | | IL13RA1:677L21 antisense siNA | uuccuGcAuuAuccuuGAcTsT | 1740 |
| | | | | (659C) stab05 | | |
| 871 | CGUCCAAGAGGCUAAAUGUGAGA | 1305 | | IL13RA1:891L21 antisense siNA | ucAcAuuuAGccucuuGGATsT | 1741 |
| | | | | (873C) stab05 | | |
| 1276 | GGAAACCGACUCUGUAGUGCUGA | 1306 | | IL13RA1:1296L21 antisense siNA | AGcAcuAcAGAGucGGuuuTsT | 1742 |
| | | | | (1278C) stab05 | | |
| 1308 | UGAAGAAAGCCUCUCAGUGAUGG | 1307 | | IL13RA1:1328L21 antisense siNA | AucAcuGAGAGGcuuucuuTsT | 1743 |
| | | | | (1310C) stab05 | | |
| 1424 | ACUGCACCAUUUAAAAACAGGCA | 1308 | | IL13RA1:1444L21 antisense siNA | ccuGuuuuuAAAuGGuGcATsT | 1744 |
| | | | | (1426C) stab05 | | |
| 2186 | CAGCAUUUUCCUCUGCUUUGAAA | 1309 | | IL13RA1:2206L21 antisense siNA | ucAAAGcAGAGGAAAAuGcTsT | 1745 |
| | | | | (2188C) stab05 | | |
| 2270 | CCAAGACCUUUCAAAGCCAUUUU | 1310 | | IL13RA1:2290L21 antisense siNA | AAuGGcuuuGAAAGGucuuTsT | 1746 |
| | | | | (2272C) stab05 | | |
| 408 | AAGGUGAUCCUGAGUCUGCUGUG | 1303 | | IL13RA1:410U21 sense siNA | B GGuGAuccuGAGucuGcuGTT B | 1747 |
| | | | | stab07 | | |
| 657 | UGGUCAAGGAUAAUGCAGGAAAA | 1304 | | IL13RA1:659U21 sense siNA | B GucAAGGAuAAuGcAGGAATT B | 1748 |
| | | | | stab07 | | |
| 871 | CGUCCAAGAGGCUAAAUGUGAGA | 1305 | | IL13RA1:873U21 sense siNA | B uccAAGAGGcuAAAuGuGATT B | 1749 |
| | | | | stab07 | | |
| 1276 | GGAAACCGACUCUGUAGUGCUGA | 1306 | | IL13RA1:1278U21 sense siNA | B AAAccGAcucuGuAGuGcuTT B | 1750 |
| | | | | stab07 | | |
| 1308 | UGAAGAAAGCCUCUCAGUGAUGG | 1307 | | IL13RA1:1310U21 sense siNA | B AAGAAAGccucucAGuGAuTT B | 1751 |
| | | | | stab07 | | |
| 1424 | ACUGCACCAUUUAAAAACAGGCA | 1308 | | IL13RA1:1426U21 sense siNA | B uGcAccAuuuAAAAAcAGGTT B | 1752 |
| | | | | stab07 | | |
| 2186 | CAGCAUUUUCCUCUGCUUUGAAA | 1309 | | IL13RA1:2188U21 sense siNA | B GcAuuuuccucuGcuuuGATT B | 1753 |
| | | | | stab07 | | |
| 2270 | CCAAGACCUUUCAAAGCCAUUUU | 1310 | | IL13RA1:2272U21 sense siNA | B AAGAccuuucAAAGccAuuTT B | 1754 |
| | | | | stab07 | | |
| 408 | AAGGUGAUCCUGAGUCUGCUGUG | 1303 | | IL13RA1:428L21 antisense siNA | cAGcAGAcucAGGAucAccTsT | 1755 |
| | | | | (410C) stab11 | | |
| 657 | UGGUCAAGGAUAAUGCAGGAAAA | 1304 | | IL13RA1:677L21 antisense siNA | uuccuGcAuuAuccuuGAcTsT | 1756 |
| | | | | (659C) stab11 | | |
| 871 | CGUCCAAGAGGCUAAAUGUGAGA | 1305 | | IL13RA1:891L21 antisense siNA | ucAcAuuuAGccucuuGGATsT | 1757 |
| | | | | (873C) stab11 | | |
| 1276 | GGAAACCGACUCUGUAGUGCUGA | 1306 | | IL13RA1:1296L21 antisense siNA | AGcAcuAcAGAGucGGuuuTsT | 1758 |
| | | | | (1278C) stab11 | | |
| 1308 | UGAAGAAAGCCUCUCAGUGAUGG | 1307 | | IL13RA1:1328L21 antisense siNA | AucAcuGAGAGGcuuucuuTsT | 1759 |
| | | | | (1310C) stab11 | | |
| 1424 | ACUGCACCAUUUAAAAACAGGCA | 1308 | | IL13RA1:1444L21 antisense siNA | ccuGuuuuuAAAuGGuGcATsT | 1760 |
| | | | | (1426C) stab11 | | |
| 2186 | CAGCAUUUUCCUCUGCUUUGAAA | 1309 | | IL13RA1:2206L21 antisense siNA | ucAAAGcAGAGGAAAAuGCTsT | 1761 |
| | | | | (2188C) stab11 | | |
| 2270 | CCAAGACCUUUCAAAGCCAUUUU | 1310 | | IL13RA1:2290L21 antisense siNA | AAuGGcuuuGAAAGGucuuTsT | 1762 |
| | | | | (2272C) stab11 | | |
| 408 | AAGGUGAUCCUGAGUCUGCUGUG | 1303 | | IL13RA1:410U21 sense siNA | B GGuGAuccuGAGucuGcuGTT B | 1763 |
| | | | | stab18 | | |
| 657 | UGGUCAAGGAUAAUGCAGGAAAA | 1304 | | IL13RA1:659U21 sense siNA | B GucAAGGAuAAuGcAGGAATT B | 1764 |
| | | | | stab18 | | |
| 871 | CGUCCAAGAGGCUAAAUGUGAGA | 1305 | | IL13RA1:873U21 sense siNA | B uccAAGAGGcuAAAuGuGATT B | 1765 |
| | | | | stab18 | | |
| 1276 | GGAAACCGACUCUGUAGUGCUGA | 1306 | | IL13RA1:1278U21 sense siNA | B AAAccGAcucuGuAGuGcuTT B | 1766 |
| | | | | stab18 | | |
| 1308 | UGAAGAAAGCCUCUCAGUGAUGG | 1307 | | IL13RA1:1310U21 sense siNA | B AAGAAAGccucucAGuGAuTT B | 1767 |
| | | | | stab18 | | |
| 1424 | ACUGCACCAUUUAAAAACAGGCA | 1308 | | IL13RA1:1426U21 sense siNA | B uGcAccAuuuAAAAAcAGGTT B | 1768 |
| | | | | stab18 | | |
| 2186 | CAGCAUUUUCCUCUGCUUUGAAA | 1309 | | IL13RA1:2188U21 sense siNA | B GcAuuuuccucuGcuuuGATT B | 1769 |
| | | | | stab18 | | |
| 2270 | CCAAGACCUUUCAAAGCCAUUUU | 1310 | | IL13RA1:2272U21 sense siNA | B AAGAccuuucAAAGccAuuTT B | 1770 |
| | | | | stab18 | | |
| 408 | AAGGUGAUCCUGAGUCUGCUGUG | 1303 | | IL13RA1:428L21 antisense siNA | cAGcAGAcucAGGAucAccTsT | 1771 |
| | | | | (410C) stab08 | | |
| 657 | UGGUCAAGGAUAAUGCAGGAAAA | 1304 | | IL13RA1:677L21 antisense siNA | uuccuGcAuuAuccuuGAcTsT | 1772 |
| | | | | (659C) stab08 | | |
| 871 | CGUCCAAGAGGCUAAAUGUGAGA | 1305 | | IL13RA1:891L21 antisense siNA | ucAcAuuuAGccucuuGGATsT | 1773 |
| | | | | (873C) stab08 | | |
| 1276 | GGAAACCGACUCUGUAGUGCUGA | 1306 | | IL13RA1:1296L21 antisense siNA | AGcAcuAcAGAGucGGuuuTsT | 1774 |
| | | | | (1278C) stab08 | | |
| 1308 | UGAAGAAAGCCUCUCAGUGAUGG | 1307 | | IL13RA1:1328L21 antisense siNA | AucAcuGAGAGGcuuucuuTsT | 1775 |
| | | | | (1310C) stab08 | | |
| 1424 | ACUGCACCAUUUAAAAACAGGCA | 1308 | | IL13RA1:1444L21 antisensesiNA | ccuGuuuuuAAAuGGuGcATsT | 1776 |
| | | | | (1426C) stab08 | | |
| 2186 | CAGCAUUUUCCUCUGCUUUGAAA | 1309 | | IL13RA1:2206L21 antisense siNA | ucAAAGcAGAGGAAAAuGcTsT | 1777 |
| | | | | (2188C) stab08 | | |
| 2270 | CCAAGACCUUUCAAAGCCAUUUU | 1310 | | IL13RA1:2290L21 antisense siNA | AAuGGcuuuGAAAGGucuuTsT | 1778 |
| | | | | (2272C) stab08 | | |
| 408 | AAGGUGAUCCUGAGUCUGCUGUG | 1303 | 36906 | IL13RA1:410U21 sense siNA | B GGUGAUCCUGAGUCUGCUGTT B | 1779 |
| | | | | stab09 | | |
| 657 | UGGUCAAGGAUAAUGCAGGAAAA | 1304 | 36907 | IL13RA1:659U21 sense siNA | B GUCAAGGAUAAUGCAGGAATT B | 1780 |
| | | | | stab09 | | |
| 871 | CGUCCAAGAGGCUAAAUGUGAGA | 1305 | 36908 | IL13RA1:873U21 sense siNA | B UCCAAGAGGCUAAAUGUGATT B | 1781 |
| | | | | stab09 | | |
| 1276 | GGAAACCGACUCUGUAGUGCUGA | 1306 | 36909 | IL13RA1:1278U21 sense siNA | B AAACCGACUCUGUAGUGCUTT B | 1782 |
| | | | | stab09 | | |
| 1308 | UGAAGAAAGCCUCUCAGUGAUGG | 1307 | 36910 | IL13RA1:1310U21 sense siNA | B AAGAAAGCCUCUCAGUGAUTT B | 1783 |
| | | | | stab09 | | |
| 1424 | ACUGCACCAUUUAAAAACAGGCA | 1308 | 36911 | IL13RA1:1426U21 sense siNA | B UGCACCAUUUAAAAACAGGTT B | 1784 |
| | | | | stab09 | | |
| 2186 | CAGCAUUUUCCUCUGCUUUGAAA | 1309 | 36912 | IL13RA1:2188U21 sense siNA | B GCAUUUUCCUCUGCUUUGATT B | 1785 |
| | | | | stab09 | | |
| 2270 | CCAAGACCUUUCAAAGCCAUUUU | 1310 | 36913 | IL13RA1:2272U21 sense siNA | B AAGACCUUUCAAAGCCAUUTT B | 1786 |
| | | | | stab09 | | |
| 408 | AAGGUGAUCCUGAGUCUGCUGUG | 1303 | | IL13RA1:428L21 antisense siNA | CAGCAGACUCAGGAUCACCTsT | 1787 |
| | | | | (410C) stab10 | | |
| 657 | UGGUCAAGGAUAAUGCAGGAAAA | 1304 | | IL13RA1:677L21 antisense siNA | UUCCUGCAUUAUCCUUGACTsT | 1788 |
| | | | | (659C) stab10 | | |
| 871 | CGUCCAAGAGGCUAAAUGUGAGA | 1305 | | IL13RA1:891L21 antisense siNA | UCACAUUUAGCCUCUUGGATsT | 1789 |
| | | | | (873C) stab10 | | |
| 1276 | GGAAACCGACUCUGUAGUGCUGA | 1306 | | IL13RA1:1296L21 antisense siNA | AGCACUACAGAGUCGGUUUTsT | 1790 |
| | | | | (1278C) stab10 | | |
| 1308 | UGAAGAAAGCCUCUCAGUGAUGG | 1307 | | IL13RA1:1328L21 antisense siNA | AUCACUGAGAGGCUUUCUUTsT | 1791 |
| | | | | (1310C) stab10 | | |
| 1424 | ACUGCACCAUUUAAAAACAGGCA | 1308 | | IL13RA1:1444L21 antisense siNA | CCUGUUUUUAAAUGGUGCATsT | 1792 |
| | | | | (1426C) stab10 | | |
| 2186 | CAGCAUUUUCCUCUGCUUUGAAA | 1309 | | IL13RA1:2206L21 antisense siNA | UCAAAGCAGAGGAAAAUGCTsT | 1793 |
| | | | | (2188C) stab10 | | |
| 2270 | CCAAGACCUUUCAAAGCCAUUUU | 1310 | | IL13RA1:2290L21 antisense siNA | AAUGGCUUUGAAAGGUCUUTsT | 1794 |
| | | | | (2272C) stab10 | | |
| 408 | AAGGUGAUCCUGAGUCUGCUGUG | 1303 | | IL13RA1:428L21 antisense siNA | cAGcAGAcucAGGAuCAccTT B | 1795 |
| | | | | (410C) stab19 | | |
| 657 | UGGUCAAGGAUAAUGCAGGAAAA | 1304 | | IL13RA1:677L21 antisense siNA | uuccuGcAuuAuccuuGAcTT B | 1796 |
| | | | | (659C) stab19 | | |
| 871 | CGUCCAAGAGGCUAAAUGUGAGA | 1305 | | IL13RA1:891L21 antisense siNA | ucAcAuuuAGccucuuGGATT B | 1797 |
| | | | | (873C) stab19 | | |
| 1276 | GGAAACCGACUCUGUAGUGCUGA | 1306 | | IL13RA1:1296L21 antisense siNA | AGcAcuAcAGAGucGGuuuTT B | 1798 |
| | | | | (1278C) stab19 | | |
| 1308 | UGAAGAAAGCCUCUCAGUGAUGG | 1307 | | IL13RA1:1328L21 antisense siNA | AucAcuGAGAGGcuuucuuTT B | 1799 |
| | | | | (1310C) stab19 | | |
| 1424 | ACUGCACCAUUUAAAAACAGGCA | 1308 | | IL13RA1:1444L21 antisense siNA | ccuGuuuuuAAAuGGuGcATT B | 1800 |
| | | | | (1426C) stab19 | | |
| 2186 | CAGCAUUUUCCUCUGCUUUGAAA | 1309 | | IL13RA1:2206L21 antisense siNA | ucAAAGcAGAGGAAAAuGcTT B | 1801 |
| | | | | (2188C) stab19 | | |
| 2270 | CCAAGACCUUUCAAAGCCAUUUU | 1310 | | IL13RA1:2290L21 antisense siNA | AAuGGcuuuGAAAGGucuuTT B | 1802 |
| | | | | (2272C) stab19 | | |
| 408 | AAGGUGAUCCUGAGUCUGCUGUG | 1303 | 36914 | IL13RA1:428L21 antisense siNA | CAGCAGACUCAGGAUCACCTT B | 1803 |
| | | | | (410C) stab22 | | |
| 657 | UGGUCAAGGAUAAUGCAGGAAAA | 1304 | 36915 | IL13RA1:677L21 antisense siNA | UUCCUGCAUUAUCCUUGACTT B | 1804 |
| | | | | (659C) stab22 | | |
| 871 | CGUCCAAGAGGCUAAAUGUGAGA | 1305 | 36916 | IL13RA1:891L21 antisense siNA | UCACAUUUAGCCUCUUGGATT B | 1805 |
| | | | | (873C) stab22 | | |
| 1276 | GGAAACCGACUCUGUAGUGCUGA | 1306 | 36917 | IL13RA1:1296L21 antisense siNA | AGCACUACAGAGUCGGUUUTT B | 1806 |
| | | | | (1278C) stab22 | | |
| 1308 | UGAAGAAAGCCUCUCAGUGAUGG | 1307 | 36918 | IL13RA1:1328L21 antisense siNA | AUCACUGAGAGGCUUUCUUTT B | 1807 |
| | | | | (1310C) stab22 | | |
| 1424 | ACUGCACCAUUUAAAAACAGGCA | 1308 | 36919 | IL13RA1:1444L21 antisense siNA | CCUGUUUUUAAAUGGUGCATT B | 1808 |
| | | | | (1426C) stab22 | | |
| 2186 | CAGCAUUUUCCUCUGCUUUGAAA | 1309 | 36920 | IL13RA1:2206L21 antisense siNA | UCAAAGCAGAGGAAAAUGCTT B | 1809 |
| | | | | (2188C) stab22 | | |
| 2270 | CCAAGACCUUUCAAAGCCAUUUU | 1310 | 36921 | IL13RA1:2290L21 antisense siNA | AAUGGCUUUGAAAGGUCUUTT B | 1810 |
| | | | | (2272C) stab22 | | |

Uppercase = ribonucleotide
u,c = 2′-deoxy-2′-fluoro U,C
T = thymidine
B = inverted deoxy abasic
s = phosphorothioate linkage
A = deoxy Adenosine
G = deoxy Guanosine
G = 2′-O-methyl Guanosine
A = 2′-O-methyl Adenosine

[0430] TABLE IV
Non-limiting examples of Stabilization Chemistries for chemically
modified siNA constructs

| Chemistry | pyrimidine | Purine | cap | p = S | Strand |
|---|---|---|---|---|---|
| “Stab 00” | Ribo | Ribo | TT at 3′- | | S/AS |
| | | | ends | | |
| “Stab 1” | Ribo | Ribo | — | 5 at 5′-end | S/AS |
| | | | | 1 at 3′-end | |
| “Stab 2” | Ribo | Ribo | — | All | Usually AS |
| | | | | linkages | |
| “Stab 3” | 2′-fluoro | Ribo | — | 4 at 5′-end | Usually S |
| | | | | 4 at 3′-end | |
| “Stab 4” | 2′-fluoro | Ribo | 5′ and 3′- | — | Usually S |
| | | | ends | | |
| “Stab 5” | 2′-fluoro | Ribo | — | 1 at 3′-end | Usually AS |
| “Stab 6” | 2′-O- | Ribo | 5′ and 3′- | — | Usually S |
| | Methyl | | ends | | |
| “Stab 7” | 2′-fluoro | 2′-deoxy | 5′ and 3′- | — | Usually S |
| | | | ends | | |
| “Stab 8” | 2′-fluoro | 2′-O- | — | 1 at 3′-end | S/AS |
| | | Methyl | | | |
| “Stab 9” | Ribo | Ribo | 5′ and 3′- | — | Usually S |
| | | | ends | | |
| “Stab 10” | Ribo | Ribo | — | 1 at 3′-end | Usually AS |
| “Stab 11” | 2′-fluoro | 2′-deoxy | — | 1 at 3′-end | Usually AS |
| “Stab 12” | 2′-fluoro | LNA | 5′ and 3′- | | Usually S |
| | | | ends | | |
| “Stab 13” | 2′-fluoro | LNA | | 1 at 3′-end | Usually AS |
| “Stab 14” | 2′-fluoro | 2′-deoxy | | 2 at 5′-end | Usually AS |
| | | | | 1 at 3′-end | |
| “Stab 15” | 2′-deoxy | 2′-deoxy | | 2 at 5′-end | Usually AS |
| | | | | 1 at 3′-end | |
| “Stab 16” | Ribo | 2′-O- | 5′ and 3′- | | Usually S |
| | | Methyl | ends | | |
| “Stab 17” | 2′-O- | 2′-O- | 5′ and 3′- | | Usually S |
| | Methyl | Methyl | ends | | |
| “Stab 18” | 2′-fluoro | 2′-O- | 5′ and 3′- | | Usually S |
| | | Methyl | ends | | |
| “Stab 19” | 2′-fluoro | 2′-O- | 3′-end | | S/AS |
| | | Methyl | | | |
| “Stab 20” | 2′-fluoro | 2′-deoxy | 3′-end | | Usually AS |
| “Stab 21” | 2′-fluoro | Ribo | 3′-end | | Usually AS |
| “Stab 22” | Ribo | Ribo | 3′-end | | Usually AS |
| “Stab 23” | 2′-fluoro* | 2′-deoxy* | 5′ and 3′- | | Usually S |
| | | | ends | | |
| “Stab 24” | 2′-fluoro* | 2′-O- | — | 1 at 3′-end | S/AS |
| | | Methyl* | | | |
| “Stab 25” | 2′-fluoro* | 2′-O- | — | 1 at 3′-end | S/AS |
| | | Methyl* | | | |
| “Stab 26” | 2′-fluoro* | 2′-O- | — | | S/AS |
| | | Methyl* | | | |
| “Stab 27” | 2′-fluoro* | 2′-O- | 3′-end | | S/AS |
| | | Methyl* | | | |
| “Stab 28” | 2′-fluoro* | 2′-O- | 3′-end | | S/AS |
| | | Methyl* | | | |
| “Stab 29” | 2′-fluoro* | 2′-O- | | 1 at 3′-end | S/AS |
| | | Methyl* | | | |
| “Stab 30” | 2′-fluoro* | 2′-O- | | | S/AS |
| | | Methyl* | | | |
| “Stab 31” | 2′-fluoro* | 2′-O- | 3′-end | | S/AS |
| | | Methyl* | | | |
| “Stab 32” | 2′-fluoro | 2′-O- | | | S/AS |
| | | Methyl | | | |

CAP = any terminal cap, see for example FIG. 10.
All Stab 00-32 chemistries can comprise 3′-terminal thymidine (TT) residues
All Stab 00-32 chemistries typically comprise about 21 nucleotides, but can vary as described herein.
S = sense strand
AS = antisense strand
*Stab 23 has a single ribonucleotide adjacent to 3′-CAP
*Stab 24 and Stab 28 have a single ribonucleotide at 5′-terminus
*Stab 25, Stab 26, and Stab 27 have three ribonucleotides at 5′-terminus
*Stab 29, Stab 30, and Stab 31, any purine at first three nucleotide positions from 5′-terminus are ribonucleotides
p = phosphorothioate linkage

[0431] TABLE V

| | | | | | |
|---|---|---|---|---|---|
| Reagent | Equivalents | Amount | Wait Time* DNA | Wait Time* 2′-O-methyl | Wait Time* RNA |

A. 2.5 μmol Synthesis Cycle ABI 394 Instrument

| | | | | | | | | | |
|---|---|---|---|---|---|---|---|---|---|
| Phosphoramidites | 6.5 | 163 | μL | 45 | sec | 2.5 | min | 7.5 | min |
| S-Ethyl Tetrazole | 23.8 | 238 | μL | 45 | sec | 2.5 | min | 7.5 | min |
| Acetic Anhydride | 100 | 233 | μL | 5 | sec | 5 | sec | 5 | sec |
| N-Methyl | 186 | 233 | μL | 5 | sec | 5 | sec | 5 | sec |
| Imidazole | | | | | | | | | |
| TCA | 176 | 2.3 | mL | 21 | sec | 21 | sec | 21 | sec |
| Iodine | 11.2 | 1.7 | mL | 45 | sec | 45 | sec | 45 | sec |
| Beaucage | 12.9 | 645 | μL | 100 | sec | 300 | sec | 300 | sec |

| | | | | | | |
|---|---|---|---|---|---|---|
| Acetonitrile | NA | 6.67 | mL | NA | NA | NA |

B. 0.2 μmol Synthesis Cycle ABI 394 Instrument

| | | | | | | | | | |
|---|---|---|---|---|---|---|---|---|---|
| Phosphoramidites | 15 | 31 | μL | 45 | sec | 233 | sec | 465 | sec |
| S-Ethyl Tetrazole | 38.7 | 31 | μL | 45 | sec | 233 | min | 465 | sec |
| Acetic Anhydride | 655 | 124 | μL | 5 | sec | 5 | sec | 5 | sec |
| N-Methyl | 1245 | 124 | μL | 5 | sec | 5 | sec | 5 | sec |
| Imidazole | | | | | | | | | |
| TCA | 700 | 732 | μL | 10 | sec | 10 | sec | 10 | sec |
| Iodine | 20.6 | 244 | μL | 15 | sec | 15 | sec | 15 | sec |
| Beaucage | 7.7 | 232 | μL | 100 | sec | 300 | sec | 300 | sec |

| | | | | | | |
|---|---|---|---|---|---|---|
| Acetonitrile | NA | 2.64 | mL | NA | NA | NA |

C. 0.2 μmol Synthesis Cycle 96 well Instrument

| | Equivalents: DNA/ | Amount: DNA/2′-O- | | Wait Time* | | | | | |
|---|---|---|---|---|---|---|---|---|---|
| Reagent | 2′-O-methyl/Ribo | methyl/Ribo | | DNA | | Wait Time* 2′-O-methyl | | Wait Time* Ribo | |
| Phosphoramidites | 22/33/66 | 40/60/120 | μL | 60 | sec | 180 | sec | 360 | sec |
| S-Ethyl Tetrazole | 70/105/210 | 40/60/120 | μL | 60 | sec | 180 | min | 360 | sec |
| Acetic Anhydride | 265/265/265 | 50/50/50 | μL | 10 | sec | 10 | sec | 10 | sec |
| N-Methyl | 502/502/502 | 50/50/50 | μL | 10 | sec | 10 | sec | 10 | sec |
| Imidazole | | | | | | | | | |
| TCA | 238/475/475 | 250/500/500 | μL | 15 | sec | 15 | sec | 15 | sec |
| Iodine | 6.8/6.8/6.8 | 80/80/80 | μL | 30 | sec | 30 | sec | 30 | sec |
| Beaucage | 34/51/51 | 80/120/120 | | 100 | sec | 200 | sec | 200 | sec |

| | | | | | | |
|---|---|---|---|---|---|---|
| Acetonitrile | NA | 1150/1150/1150 | μL | NA | NA | NA |

*Wait time does not include contact time during delivery.
*Tandem synthesis utilizes double coupling of linker molecule

1. A chemically synthesized double stranded short interfering nucleic acid (siNA) molecule that directs cleavage of an interleukin-13 receptor (IL-13R)RNA via RNA interference (RNAi), wherein:
a) each strand of said siNA molecule is about 18 to about 23 nucleotides in length; and
b) one strand of said siNA molecule comprises nucleotide sequence having sufficient complementarity to said IL-13R RNA for the siNA molecule to direct cleavage of the IL-13R RNA via RNA interference.

2. The siNA molecule of claim 1, wherein said siNA molecule comprises no ribonucleotides.

3. The siNA molecule of claim 1, wherein said siNA molecule comprises one or more ribonucleotides.

4. The siNA molecule of claim 1, wherein one strand of said double-stranded siNA molecule comprises a nucleotide sequence that is complementary to a nucleotide sequence of an IL-13R gene or a portion thereof, and wherein a second strand of said double-stranded siNA molecule comprises a nucleotide sequence substantially similar to the nucleotide sequence or a portion thereof of said IL-13R RNA.

5. The siNA molecule of claim 4, wherein each strand of the siNA molecule comprises about 18 to about 23 nucleotides, and wherein each strand comprises at least about 19 nucleotides that are complementary to the nucleotides of the other strand.

6. The siNA molecule of claim 1, wherein said siNA molecule comprises an antisense region comprising a nucleotide sequence that is complementary to a nucleotide sequence of a IL-13R gene or a portion thereof, and wherein said siNA further comprises a sense region, wherein said sense region comprises a nucleotide sequence substantially similar to the nucleotide sequence of said IL-13R gene or a portion thereof.

7. The siNA molecule of claim 6, wherein said antisense region and said sense region comprise about 18 to about 23 nucleotides, and wherein said antisense region comprises at least about 18 nucleotides that are complementary to nucleotides of the sense region.

8. The siNA molecule of claim 1, wherein said siNA molecule comprises a sense region and an antisense region, and wherein said antisense region comprises a nucleotide sequence that is complementary to a nucleotide sequence of RNA encoded by an IL-13R gene, or a portion thereof, and said sense region comprises a nucleotide sequence that is complementary to said antisense region.

9. The siNA molecule of claim 6, wherein said siNA molecule is assembled from two separate oligonucleotide fragments wherein one fragment comprises the sense region and a second fragment comprises the antisense region of said siNA molecule.

10. The siNA molecule of claim 6, wherein said sense region is connected to the antisense region via a linker molecule.

11. The siNA molecule of claim 10, wherein said linker molecule is a polynucleotide linker.

12. The siNA molecule of claim 10, wherein said linker molecule is a non-nucleotide linker.

13. The siNA molecule of claim 6, wherein pyrimidine nucleotides in the sense region are 2′-O-methylpyrimidine nucleotides.

14. The siNA molecule of claim 6, wherein purine nucleotides in the sense region are 2′-deoxy purine nucleotides.

15. The siNA molecule of claim 6, wherein pyrimidine nucleotides present in the sense region are 2′-deoxy-2′-fluoro pyrimidine nucleotides.

16. The siNA molecule of claim 9, wherein the fragment comprising said sense region includes a terminal cap moiety at a 5′-end, a 3′-end, or both of the 5′ and 3′ ends of the fragment comprising said sense region.

17. The siNA molecule of claim 16, wherein said terminal cap moiety is an inverted deoxy abasic moiety.

18. The siNA molecule of claim 6, wherein pyrimidine nucleotides of said antisense region are 2′-deoxy-2′-fluoro pyrimidine nucleotides.

19. The siNA molecule of claim 6, wherein purine nucleotides of said antisense region are 2′-O-methyl purine nucleotides.

20. The siNA molecule of claim 6, wherein purine nucleotides present in said antisense region comprise 2′-deoxy-purine nucleotides.

21. The siNA molecule of claim 18, wherein said antisense region comprises a phosphorothioate internucleotide linkage at the 3′ end of said antisense region.

22. The siNA molecule of claim 6, wherein said antisense region comprises a glyceryl modification at a 3′ end of said antisense region.

23. The siNA molecule of claim 9, wherein each of the two fragments of said siNA molecule comprise about 21 nucleotides.

24. The siNA molecule of claim 23, wherein about 19 nucleotides of each fragment of the siNA molecule are base-paired to the complementary nucleotides of the other fragment of the siNA molecule and wherein at least two 3′ terminal nucleotides of each fragment of the siNA molecule are not base-paired to the nucleotides of the other fragment of the siNA molecule.

25. The siNA molecule of claim 24, wherein each of the two 3′ terminal nucleotides of each fragment of the siNA molecule are 2′-deoxy-pyrimidines.

26. The siNA molecule of claim 25, wherein said 2′-deoxy-pyrimidine is 2′-deoxy-thymidine.

27. The siNA molecule of claim 23, wherein all of the about 21 nucleotides of each fragment of the siNA molecule are base-paired to the complementary nucleotides of the other fragment of the siNA molecule.

28. The siNA molecule of claim 23, wherein about 19 nucleotides of the antisense region are base-paired to the nucleotide sequence of the RNA encoded by an IL-13R gene or a portion thereof.

29. The siNA molecule of claim 23, wherein about 21 nucleotides of the antisense region are base-paired to the nucleotide sequence of the RNA encoded by an IL-13R gene or a portion thereof.

30. The siNA molecule of claim 9, wherein a 5′-end of the fragment comprising said antisense region optionally includes a phosphate group.

31. A composition comprising the siNA molecule of claim 1 in an pharmaceutically acceptable carrier or diluent.

32. A siNA according to claim 1 wherein the IL-13R RNA comprises Genbank Accession No. NM_{—}001560.

33. A siNA according to claim 1 wherein said siNA comprises any of SEQ ID NOs: 1-1828.

34. A composition comprising the siNA of claim 32 together with a pharmaceutically acceptable carrier or diluent.

35. A composition comprising the siNA of claim 33 together with a pharmaceutically acceptable carrier or diluent.

The application's sequence listing, which the Patent Office published only in electronic form, follows.

SEQUENCE LISTING (1832 sequences)

SEQ ID NO: 1 - RNA, 19 nt, Artificial Sequence
  Description of Artificial Sequence:  Target Sequence/siNA sense region
agagcaagcgccauguuga

SEQ ID NO: 2 - RNA, 19 nt, Artificial Sequence
  Description of Artificial Sequence:  Target Sequence/siNA sense region
aagccaucauuaccauuca

SEQ ID NO: 3 - RNA, 19 nt, Artificial Sequence
  Description of Artificial Sequence:  Target Sequence/siNA sense region
acaucccucuuauuccugc

SEQ ID NO: 4 - RNA, 19 nt, Artificial Sequence
  Description of Artificial Sequence:  Target Sequence/siNA sense region
cagcugccccugcugggag

SEQ ID NO: 5 - RNA, 19 nt, Artificial Sequence
  Description of Artificial Sequence:  Target Sequence/siNA sense region
guggggcugaacacgacaa

SEQ ID NO: 6 - RNA, 19 nt, Artificial Sequence
  Description of Artificial Sequence:  Target Sequence/siNA sense region
auucugacgcccaauggga

SEQ ID NO: 7 - RNA, 19 nt, Artificial Sequence
  Description of Artificial Sequence:  Target Sequence/siNA sense region
aaugaagacaccacagcug

SEQ ID NO: 8 - RNA, 19 nt, Artificial Sequence
  Description of Artificial Sequence:  Target Sequence/siNA sense region
gauuucuuccugaccacua

SEQ ID NO: 9 - RNA, 19 nt, Artificial Sequence
  Description of Artificial Sequence:  Target Sequence/siNA sense region
augcccacugacucccuca

SEQ ID NO: 10 - RNA, 19 nt, Artificial Sequence
  Description of Artificial Sequence:  Target Sequence/siNA sense region
aguguuuccacucugcccc

SEQ ID NO: 11 - RNA, 19 nt, Artificial Sequence
  Description of Artificial Sequence:  Target Sequence/siNA sense region
cucccagagguucaguguu

SEQ ID NO: 12 - RNA, 19 nt, Artificial Sequence
  Description of Artificial Sequence:  Target Sequence/siNA sense region
uuuguguucaaugucgagu

SEQ ID NO: 13 - RNA, 19 nt, Artificial Sequence
  Description of Artificial Sequence:  Target Sequence/siNA sense region
uacaugaauugcacuugga

SEQ ID NO: 14 - RNA, 19 nt, Artificial Sequence
  Description of Artificial Sequence:  Target Sequence/siNA sense region
aacagcagcucugagcccc

SEQ ID NO: 15 - RNA, 19 nt, Artificial Sequence
  Description of Artificial Sequence:  Target Sequence/siNA sense region
cagccuaccaaccucacuc

SEQ ID NO: 16 - RNA, 19 nt, Artificial Sequence
  Description of Artificial Sequence:  Target Sequence/siNA sense region
cugcauuauugguacaaga

SEQ ID NO: 17 - RNA, 19 nt, Artificial Sequence
  Description of Artificial Sequence:  Target Sequence/siNA sense region
aacucggauaaugauaaag

SEQ ID NO: 18 - RNA, 19 nt, Artificial Sequence
  Description of Artificial Sequence:  Target Sequence/siNA sense region
guccagaagugcagccacu

SEQ ID NO: 19 - RNA, 19 nt, Artificial Sequence
  Description of Artificial Sequence:  Target Sequence/siNA sense region
uaucuauucucugaagaaa

SEQ ID NO: 20 - RNA, 19 nt, Artificial Sequence
  Description of Artificial Sequence:  Target Sequence/siNA sense region
aucacuucuggcugucagu

SEQ ID NO: 21 - RNA, 19 nt, Artificial Sequence
  Description of Artificial Sequence:  Target Sequence/siNA sense region
uugcaaaaaaaggagaucc

SEQ ID NO: 22 - RNA, 19 nt, Artificial Sequence
  Description of Artificial Sequence:  Target Sequence/siNA sense region
caccucuaccaaacauuug

SEQ ID NO: 23 - RNA, 19 nt, Artificial Sequence
  Description of Artificial Sequence:  Target Sequence/siNA sense region
guuguucagcuccaggacc

SEQ ID NO: 24 - RNA, 19 nt, Artificial Sequence
  Description of Artificial Sequence:  Target Sequence/siNA sense region
ccacgggaacccaggagac

SEQ ID NO: 25 - RNA, 19 nt, Artificial Sequence
  Description of Artificial Sequence:  Target Sequence/siNA sense region
caggccacacagaugcuaa

SEQ ID NO: 26 - RNA, 19 nt, Artificial Sequence
  Description of Artificial Sequence:  Target Sequence/siNA sense region
aaacugcagaaucugguga

SEQ ID NO: 27 - RNA, 19 nt, Artificial Sequence
  Description of Artificial Sequence:  Target Sequence/siNA sense region
auccccugggcuccagaga

SEQ ID NO: 28 - RNA, 19 nt, Artificial Sequence
  Description of Artificial Sequence:  Target Sequence/siNA sense region
aaccuaacacuucacaaac

SEQ ID NO: 29 - RNA, 19 nt, Artificial Sequence
  Description of Artificial Sequence:  Target Sequence/siNA sense region
cugagugaaucccagcuag

SEQ ID NO: 30 - RNA, 19 nt, Artificial Sequence
  Description of Artificial Sequence:  Target Sequence/siNA sense region
gaacugaacuggaacaaca

SEQ ID NO: 31 - RNA, 19 nt, Artificial Sequence
  Description of Artificial Sequence:  Target Sequence/siNA sense region
agauucuugaaccacuguu

SEQ ID NO: 32 - RNA, 19 nt, Artificial Sequence
  Description of Artificial Sequence:  Target Sequence/siNA sense region
uuggagcacuuggugcagu

SEQ ID NO: 33 - RNA, 19 nt, Artificial Sequence
  Description of Artificial Sequence:  Target Sequence/siNA sense region
uaccggacugacugggacc

SEQ ID NO: 34 - RNA, 19 nt, Artificial Sequence
  Description of Artificial Sequence:  Target Sequence/siNA sense region
cacagcuggacugaacaau

SEQ ID NO: 35 - RNA, 19 nt, Artificial Sequence
  Description of Artificial Sequence:  Target Sequence/siNA sense region
ucaguggauuauagacaua

SEQ ID NO: 36 - RNA, 19 nt, Artificial Sequence
  Description of Artificial Sequence:  Target Sequence/siNA sense region
aaguucuccuugccuagug

SEQ ID NO: 37 - RNA, 19 nt, Artificial Sequence
  Description of Artificial Sequence:  Target Sequence/siNA sense region
guggaugggcagaaacgcu

SEQ ID NO: 38 - RNA, 19 nt, Artificial Sequence
  Description of Artificial Sequence:  Target Sequence/siNA sense region
uacacguuucguguucgga

SEQ ID NO: 39 - RNA, 19 nt, Artificial Sequence
  Description of Artificial Sequence:  Target Sequence/siNA sense region
agccgcuuuaacccacucu

SEQ ID NO: 40 - RNA, 19 nt, Artificial Sequence
  Description of Artificial Sequence:  Target Sequence/siNA sense region
uguggaagugcucagcauu

SEQ ID NO: 41 - RNA, 19 nt, Artificial Sequence
  Description of Artificial Sequence:  Target Sequence/siNA sense region
uggagugaauggagccacc

SEQ ID NO: 42 - RNA, 19 nt, Artificial Sequence
  Description of Artificial Sequence:  Target Sequence/siNA sense region
ccaauccacugggggagca

SEQ ID NO: 43 - RNA, 19 nt, Artificial Sequence
  Description of Artificial Sequence:  Target Sequence/siNA sense region
aauacuucaaaagagaauc

SEQ ID NO: 44 - RNA, 19 nt, Artificial Sequence
  Description of Artificial Sequence:  Target Sequence/siNA sense region
ccuuuccuguuugcauugg

SEQ ID NO: 45 - RNA, 19 nt, Artificial Sequence
  Description of Artificial Sequence:  Target Sequence/siNA sense region
gaagccgugguuaucucug

SEQ ID NO: 46 - RNA, 19 nt, Artificial Sequence
  Description of Artificial Sequence:  Target Sequence/siNA sense region
guuggcuccaugggauuga

SEQ ID NO: 47 - RNA, 19 nt, Artificial Sequence
  Description of Artificial Sequence:  Target Sequence/siNA sense region
auuaucagccuucucugug

SEQ ID NO: 48 - RNA, 19 nt, Artificial Sequence
  Description of Artificial Sequence:  Target Sequence/siNA sense region
guguauuucuggcuggaac

SEQ ID NO: 49 - RNA, 19 nt, Artificial Sequence
  Description of Artificial Sequence:  Target Sequence/siNA sense region
cggacgaugccccgaauuc

SEQ ID NO: 50 - RNA, 19 nt, Artificial Sequence
  Description of Artificial Sequence:  Target Sequence/siNA sense region
cccacccugaagaaccuag

SEQ ID NO: 51 - RNA, 19 nt, Artificial Sequence
  Description of Artificial Sequence:  Target Sequence/siNA sense region
gaggaucuuguuacugaau

SEQ ID NO: 52 - RNA, 19 nt, Artificial Sequence
  Description of Artificial Sequence:  Target Sequence/siNA sense region
uaccacgggaacuuuucgg

SEQ ID NO: 53 - RNA, 19 nt, Artificial Sequence
  Description of Artificial Sequence:  Target Sequence/siNA sense region
gccuggaguggugugucua

SEQ ID NO: 54 - RNA, 19 nt, Artificial Sequence
  Description of Artificial Sequence:  Target Sequence/siNA sense region
aagggacuggcugagaguc

SEQ ID NO: 55 - RNA, 19 nt, Artificial Sequence
  Description of Artificial Sequence:  Target Sequence/siNA sense region
cugcagccagacuacagug

SEQ ID NO: 56 - RNA, 19 nt, Artificial Sequence
  Description of Artificial Sequence:  Target Sequence/siNA sense region
gaacgacucugccucguca

SEQ ID NO: 57 - RNA, 19 nt, Artificial Sequence
  Description of Artificial Sequence:  Target Sequence/siNA sense region
agugagauucccccaaaag

SEQ ID NO: 58 - RNA, 19 nt, Artificial Sequence
  Description of Artificial Sequence:  Target Sequence/siNA sense region
ggaggggcccuuggggagg

SEQ ID NO: 59 - RNA, 19 nt, Artificial Sequence
  Description of Artificial Sequence:  Target Sequence/siNA sense region
gggccuggggccuccccau

SEQ ID NO: 60 - RNA, 19 nt, Artificial Sequence
  Description of Artificial Sequence:  Target Sequence/siNA sense region
ugcaaccagcauagccccu

SEQ ID NO: 61 - RNA, 19 nt, Artificial Sequence
  Description of Artificial Sequence:  Target Sequence/siNA sense region
uacugggcccccccauguu

SEQ ID NO: 62 - RNA, 19 nt, Artificial Sequence
  Description of Artificial Sequence:  Target Sequence/siNA sense region
uacacccuaaagccugaaa

SEQ ID NO: 63 - RNA, 19 nt, Artificial Sequence
  Description of Artificial Sequence:  Target Sequence/siNA sense region
accugaaccccaauccucu

SEQ ID NO: 64 - RNA, 19 nt, Artificial Sequence
  Description of Artificial Sequence:  Target Sequence/siNA sense region
ugacagaagaaccccaggg

SEQ ID NO: 65 - RNA, 19 nt, Artificial Sequence
  Description of Artificial Sequence:  Target Sequence/siNA sense region
guccuguagcccuaagugg

SEQ ID NO: 66 - RNA, 19 nt, Artificial Sequence
  Description of Artificial Sequence:  Target Sequence/siNA sense region
guacuaacuuuccuucauu

SEQ ID NO: 67 - RNA, 19 nt, Artificial Sequence
  Description of Artificial Sequence:  Target Sequence/siNA sense region
ucaacccaccugcgucuca

SEQ ID NO: 68 - RNA, 19 nt, Artificial Sequence
  Description of Artificial Sequence:  Target Sequence/siNA sense region
auacucaccucaccccacu

SEQ ID NO: 69 - RNA, 19 nt, Artificial Sequence
  Description of Artificial Sequence:  Target Sequence/siNA sense region
uguggcugauuuggaauuu

SEQ ID NO: 70 - RNA, 19 nt, Artificial Sequence
  Description of Artificial Sequence:  Target Sequence/siNA sense region
uugugcccccauguaagca

SEQ ID NO: 71 - RNA, 19 nt, Artificial Sequence
  Description of Artificial Sequence:  Target Sequence/siNA sense region
accccuucauuuggcauuc

SEQ ID NO: 72 - RNA, 19 nt, Artificial Sequence
  Description of Artificial Sequence:  Target Sequence/siNA sense region
ccccacuugagaauuaccc

SEQ ID NO: 73 - RNA, 19 nt, Artificial Sequence
  Description of Artificial Sequence:  Target Sequence/siNA sense region
cuuuugccccgaacauguu

SEQ ID NO: 74 - RNA, 19 nt, Artificial Sequence
  Description of Artificial Sequence:  Target Sequence/siNA sense region
uuuucuucucccucagucu

SEQ ID NO: 75 - RNA, 19 nt, Artificial Sequence
  Description of Artificial Sequence:  Target Sequence/siNA sense region
uggcccuuccuuuucgcag

SEQ ID NO: 76 - RNA, 19 nt, Artificial Sequence
  Description of Artificial Sequence:  Target Sequence/siNA sense region
ggauucuuccucccucccu

SEQ ID NO: 77 - RNA, 19 nt, Artificial Sequence
  Description of Artificial Sequence:  Target Sequence/siNA sense region
ucuuucccucccuuccucu

SEQ ID NO: 78 - RNA, 19 nt, Artificial Sequence
  Description of Artificial Sequence:  Target Sequence/siNA sense region
uuuccaucuacccuccgau

SEQ ID NO: 79 - RNA, 19 nt, Artificial Sequence
  Description of Artificial Sequence:  Target Sequence/siNA sense region
uuguuccugaaccgaugag

SEQ ID NO: 80 - RNA, 19 nt, Artificial Sequence
  Description of Artificial Sequence:  Target Sequence/siNA sense region
gaaauaaaguuucuguuga

SEQ ID NO: 81 - RNA, 19 nt, Artificial Sequence
  Description of Artificial Sequence:  Target Sequence/siNA sense region
aaguuucuguugauaauca

SEQ ID NO: 82 - RNA, 19 nt, Artificial Sequence
  Description of Artificial Sequence:  siNA antisense region
ucaacauggcgcuugcucu

SEQ ID NO: 83 - RNA, 19 nt, Artificial Sequence
  Description of Artificial Sequence:  siNA antisense region
ugaaugguaaugauggcuu

SEQ ID NO: 84 - RNA, 19 nt, Artificial Sequence
  Description of Artificial Sequence:  siNA antisense region
gcaggaauaagagggaugu

SEQ ID NO: 85 - RNA, 19 nt, Artificial Sequence
  Description of Artificial Sequence:  siNA antisense region
cucccagcaggggcagcug

SEQ ID NO: 86 - RNA, 19 nt, Artificial Sequence
  Description of Artificial Sequence:  siNA antisense region
uugucguguucagccccac

SEQ ID NO: 87 - RNA, 19 nt, Artificial Sequence
  Description of Artificial Sequence:  siNA antisense region
ucccauugggcgucagaau

SEQ ID NO: 88 - RNA, 19 nt, Artificial Sequence
  Description of Artificial Sequence:  siNA antisense region
cagcuguggugucuucauu

SEQ ID NO: 89 - RNA, 19 nt, Artificial Sequence
  Description of Artificial Sequence:  siNA antisense region
uaguggucaggaagaaauc

SEQ ID NO: 90 - RNA, 19 nt, Artificial Sequence
  Description of Artificial Sequence:  siNA antisense region
ugagggagucagugggcau

SEQ ID NO: 91 - RNA, 19 nt, Artificial Sequence
  Description of Artificial Sequence:  siNA antisense region
ggggcagaguggaaacacu

SEQ ID NO: 92 - RNA, 19 nt, Artificial Sequence
  Description of Artificial Sequence:  siNA antisense region
aacacugaaccucugggag

SEQ ID NO: 93 - RNA, 19 nt, Artificial Sequence
  Description of Artificial Sequence:  siNA antisense region
acucgacauugaacacaaa

SEQ ID NO: 94 - RNA, 19 nt, Artificial Sequence
  Description of Artificial Sequence:  siNA antisense region
uccaagugcaauucaugua

SEQ ID NO: 95 - RNA, 19 nt, Artificial Sequence
  Description of Artificial Sequence:  siNA antisense region
ggggcucagagcugcuguu

SEQ ID NO: 96 - RNA, 19 nt, Artificial Sequence
  Description of Artificial Sequence:  siNA antisense region
gagugagguugguaggcug

SEQ ID NO: 97 - RNA, 19 nt, Artificial Sequence
  Description of Artificial Sequence:  siNA antisense region
ucuuguaccaauaaugcag

SEQ ID NO: 98 - RNA, 19 nt, Artificial Sequence
  Description of Artificial Sequence:  siNA antisense region
cuuuaucauuauccgaguu

SEQ ID NO: 99 - RNA, 19 nt, Artificial Sequence
  Description of Artificial Sequence:  siNA antisense region
aguggcugcacuucuggac

SEQ ID NO: 100 - RNA, 19 nt, Artificial Sequence
  Description of Artificial Sequence:  siNA antisense region
uuucuucagagaauagaua

SEQ ID NO: 101 - RNA, 19 nt, Artificial Sequence
  Description of Artificial Sequence:  siNA antisense region
acugacagccagaagugau

SEQ ID NO: 102 - RNA, 19 nt, Artificial Sequence
  Description of Artificial Sequence:  siNA antisense region
ggaucuccuuuuuuugcaa

SEQ ID NO: 103 - RNA, 19 nt, Artificial Sequence
  Description of Artificial Sequence:  siNA antisense region
caaauguuugguagaggug

SEQ ID NO: 104 - RNA, 19 nt, Artificial Sequence
  Description of Artificial Sequence:  siNA antisense region
gguccuggagcugaacaac

SEQ ID NO: 105 - RNA, 19 nt, Artificial Sequence
  Description of Artificial Sequence:  siNA antisense region
gucuccuggguucccgugg

SEQ ID NO: 106 - RNA, 19 nt, Artificial Sequence
  Description of Artificial Sequence:  siNA antisense region
uuagcaucuguguggccug

SEQ ID NO: 107 - RNA, 19 nt, Artificial Sequence
  Description of Artificial Sequence:  siNA antisense region
ucaccagauucugcaguuu

SEQ ID NO: 108 - RNA, 19 nt, Artificial Sequence
  Description of Artificial Sequence:  siNA antisense region
ucucuggagcccaggggau

SEQ ID NO: 109 - RNA, 19 nt, Artificial Sequence
  Description of Artificial Sequence:  siNA antisense region
guuugugaaguguuagguu

SEQ ID NO: 110 - RNA, 19 nt, Artificial Sequence
  Description of Artificial Sequence:  siNA antisense region
cuagcugggauucacucag

SEQ ID NO: 111 - RNA, 19 nt, Artificial Sequence
  Description of Artificial Sequence:  siNA antisense region
uguuguuccaguucaguuc

SEQ ID NO: 112 - RNA, 19 nt, Artificial Sequence
  Description of Artificial Sequence:  siNA antisense region
aacagugguucaagaaucu

SEQ ID NO: 113 - RNA, 19 nt, Artificial Sequence
  Description of Artificial Sequence:  siNA antisense region
acugcaccaagugcuccaa

SEQ ID NO: 114 - RNA, 19 nt, Artificial Sequence
  Description of Artificial Sequence:  siNA antisense region
ggucccagucaguccggua

SEQ ID NO: 115 - RNA, 19 nt, Artificial Sequence
  Description of Artificial Sequence:  siNA antisense region
auuguucaguccagcugug

SEQ ID NO: 116 - RNA, 19 nt, Artificial Sequence
  Description of Artificial Sequence:  siNA antisense region
uaugucuauaauccacuga

SEQ ID NO: 117 - RNA, 19 nt, Artificial Sequence
  Description of Artificial Sequence:  siNA antisense region
cacuaggcaaggagaacuu

SEQ ID NO: 118 - RNA, 19 nt, Artificial Sequence
  Description of Artificial Sequence:  siNA antisense region
agcguuucugcccauccac

SEQ ID NO: 119 - RNA, 19 nt, Artificial Sequence
  Description of Artificial Sequence:  siNA antisense region
uccgaacacgaaacgugua

SEQ ID NO: 120 - RNA, 19 nt, Artificial Sequence
  Description of Artificial Sequence:  siNA antisense region
agaguggguuaaagcggcu

SEQ ID NO: 121 - RNA, 19 nt, Artificial Sequence
  Description of Artificial Sequence:  siNA antisense region
aaugcugagcacuuccaca

SEQ ID NO: 122 - RNA, 19 nt, Artificial Sequence
  Description of Artificial Sequence:  siNA antisense region
gguggcuccauucacucca

SEQ ID NO: 123 - RNA, 19 nt, Artificial Sequence
  Description of Artificial Sequence:  siNA antisense region
ugcucccccaguggauugg

SEQ ID NO: 124 - RNA, 19 nt, Artificial Sequence
  Description of Artificial Sequence:  siNA antisense region
gauucucuuuugaaguauu

SEQ ID NO: 125 - RNA, 19 nt, Artificial Sequence
  Description of Artificial Sequence:  siNA antisense region
ccaaugcaaacaggaaagg

SEQ ID NO: 126 - RNA, 19 nt, Artificial Sequence
  Description of Artificial Sequence:  siNA antisense region
cagagauaaccacggcuuc

SEQ ID NO: 127 - RNA, 19 nt, Artificial Sequence
  Description of Artificial Sequence:  siNA antisense region
ucaaucccauggagccaac

SEQ ID NO: 128 - RNA, 19 nt, Artificial Sequence
  Description of Artificial Sequence:  siNA antisense region
cacagagaaggcugauaau

SEQ ID NO: 129 - RNA, 19 nt, Artificial Sequence
  Description of Artificial Sequence:  siNA antisense region
guuccagccagaaauacac

SEQ ID NO: 130 - RNA, 19 nt, Artificial Sequence
  Description of Artificial Sequence:  siNA antisense region
gaauucggggcaucguccg

SEQ ID NO: 131 - RNA, 19 nt, Artificial Sequence
  Description of Artificial Sequence:  siNA antisense region
cuagguucuucaggguggg

SEQ ID NO: 132 - RNA, 19 nt, Artificial Sequence
  Description of Artificial Sequence:  siNA antisense region
auucaguaacaagauccuc

SEQ ID NO: 133 - RNA, 19 nt, Artificial Sequence
  Description of Artificial Sequence:  siNA antisense region
ccgaaaaguucccguggua

SEQ ID NO: 134 - RNA, 19 nt, Artificial Sequence
  Description of Artificial Sequence:  siNA antisense region
uagacacaccacuccaggc

SEQ ID NO: 135 - RNA, 19 nt, Artificial Sequence
  Description of Artificial Sequence:  siNA antisense region
gacucucagccagucccuu

SEQ ID NO: 136 - RNA, 19 nt, Artificial Sequence
  Description of Artificial Sequence:  siNA antisense region
cacuguagucuggcugcag

SEQ ID NO: 137 - RNA, 19 nt, Artificial Sequence
  Description of Artificial Sequence:  siNA antisense region
ugacgaggcagagucguuc

SEQ ID NO: 138 - RNA, 19 nt, Artificial Sequence
  Description of Artificial Sequence:  siNA antisense region
cuuuugggggaaucucacu

SEQ ID NO: 139 - RNA, 19 nt, Artificial Sequence
  Description of Artificial Sequence:  siNA antisense region
ccuccccaagggccccucc

SEQ ID NO: 140 - RNA, 19 nt, Artificial Sequence
  Description of Artificial Sequence:  siNA antisense region
auggggaggccccaggccc

SEQ ID NO: 141 - RNA, 19 nt, Artificial Sequence
  Description of Artificial Sequence:  siNA antisense region
aggggcuaugcugguugca

SEQ ID NO: 142 - RNA, 19 nt, Artificial Sequence
  Description of Artificial Sequence:  siNA antisense region
aacaugggggggcccagua

SEQ ID NO: 143 - RNA, 19 nt, Artificial Sequence
  Description of Artificial Sequence:  siNA antisense region
uuucaggcuuuagggugua

SEQ ID NO: 144 - RNA, 19 nt, Artificial Sequence
  Description of Artificial Sequence:  siNA antisense region
agaggauugggguucaggu

SEQ ID NO: 145 - RNA, 19 nt, Artificial Sequence
  Description of Artificial Sequence:  siNA antisense region
cccugggguucuucuguca

SEQ ID NO: 146 - RNA, 19 nt, Artificial Sequence
  Description of Artificial Sequence:  siNA antisense region
ccacuuagggcuacaggac

SEQ ID NO: 147 - RNA, 19 nt, Artificial Sequence
  Description of Artificial Sequence:  siNA antisense region
aaugaaggaaaguuaguac

SEQ ID NO: 148 - RNA, 19 nt, Artificial Sequence
  Description of Artificial Sequence:  siNA antisense region
ugagacgcagguggguuga

SEQ ID NO: 149 - RNA, 19 nt, Artificial Sequence
  Description of Artificial Sequence:  siNA antisense region
aguggggugaggugaguau

SEQ ID NO: 150 - RNA, 19 nt, Artificial Sequence
  Description of Artificial Sequence:  siNA antisense region
aaauuccaaaucagccaca

SEQ ID NO: 151 - RNA, 19 nt, Artificial Sequence
  Description of Artificial Sequence:  siNA antisense region
ugcuuacaugggggcacaa

SEQ ID NO: 152 - RNA, 19 nt, Artificial Sequence
  Description of Artificial Sequence:  siNA antisense region
gaaugccaaaugaaggggu

SEQ ID NO: 153 - RNA, 19 nt, Artificial Sequence
  Description of Artificial Sequence:  siNA antisense region
ggguaauucucaagugggg

SEQ ID NO: 154 - RNA, 19 nt, Artificial Sequence
  Description of Artificial Sequence:  siNA antisense region
aacauguucggggcaaaag

SEQ ID NO: 155 - RNA, 19 nt, Artificial Sequence
  Description of Artificial Sequence:  siNA antisense region
agacugagggagaagaaaa

SEQ ID NO: 156 - RNA, 19 nt, Artificial Sequence
  Description of Artificial Sequence:  siNA antisense region
cugcgaaaaggaagggcca

SEQ ID NO: 157 - RNA, 19 nt, Artificial Sequence
  Description of Artificial Sequence:  siNA antisense region
agggagggaggaagaaucc

SEQ ID NO: 158 - RNA, 19 nt, Artificial Sequence
  Description of Artificial Sequence:  siNA antisense region
agaggaagggagggaaaga

SEQ ID NO: 159 - RNA, 19 nt, Artificial Sequence
  Description of Artificial Sequence:  siNA antisense region
aucggaggguagauggaaa

SEQ ID NO: 160 - RNA, 19 nt, Artificial Sequence
  Description of Artificial Sequence:  siNA antisense region
cucaucgguucaggaacaa

SEQ ID NO: 161 - RNA, 19 nt, Artificial Sequence
  Description of Artificial Sequence:  siNA antisense region
ucaacagaaacuuuauuuc

SEQ ID NO: 162 - RNA, 19 nt, Artificial Sequence
  Description of Artificial Sequence:  siNA antisense region
ugauuaucaacagaaacuu

SEQ ID NO: 163 - RNA, 19 nt, Artificial Sequence
  Description of Artificial Sequence:  Target Sequence/siNA sense region
cuaugcaaagcaaaaagcc

SEQ ID NO: 164 - RNA, 19 nt, Artificial Sequence
  Description of Artificial Sequence:  Target Sequence/siNA sense region
cagcagcagccccaagcug

SEQ ID NO: 165 - RNA, 19 nt, Artificial Sequence
  Description of Artificial Sequence:  Target Sequence/siNA sense region
gauaagauuaaucuaaaga

SEQ ID NO: 166 - RNA, 19 nt, Artificial Sequence
  Description of Artificial Sequence:  Target Sequence/siNA sense region
agcaaauuaugguguaauu

SEQ ID NO: 167 - RNA, 19 nt, Artificial Sequence
  Description of Artificial Sequence:  Target Sequence/siNA sense region
uuccuaugcugaaacuuug

SEQ ID NO: 168 - RNA, 19 nt, Artificial Sequence
  Description of Artificial Sequence:  Target Sequence/siNA sense region
guaguuaauuuuuuaaaaa

SEQ ID NO: 169 - RNA, 19 nt, Artificial Sequence
  Description of Artificial Sequence:  Target Sequence/siNA sense region
agguuucauuuuccuauug

SEQ ID NO: 170 - RNA, 19 nt, Artificial Sequence
  Description of Artificial Sequence:  Target Sequence/siNA sense region
ggucugauuucacaggaac

SEQ ID NO: 171 - RNA, 19 nt, Artificial Sequence
  Description of Artificial Sequence:  Target Sequence/siNA sense region
cauuuuaccuguuugugag

SEQ ID NO: 172 - RNA, 19 nt, Artificial Sequence
  Description of Artificial Sequence:  Target Sequence/siNA sense region
ggcauuuuuucuccuggaa

SEQ ID NO: 173 - RNA, 19 nt, Artificial Sequence
  Description of Artificial Sequence:  Target Sequence/siNA sense region
agagaggugcugauuggcc

SEQ ID NO: 174 - RNA, 19 nt, Artificial Sequence
  Description of Artificial Sequence:  Target Sequence/siNA sense region
cccaagugacugacaaucu

SEQ ID NO: 175 - RNA, 19 nt, Artificial Sequence
  Description of Artificial Sequence:  Target Sequence/siNA sense region
ugguguaacgaaaauuucc

SEQ ID NO: 176 - RNA, 19 nt, Artificial Sequence
  Description of Artificial Sequence:  Target Sequence/siNA sense region
caauguaaacucauuuucc

SEQ ID NO: 177 - RNA, 19 nt, Artificial Sequence
  Description of Artificial Sequence:  Target Sequence/siNA sense region
ccucgguuucagcaauuuu

SEQ ID NO: 178 - RNA, 19 nt, Artificial Sequence
  Description of Artificial Sequence:  Target Sequence/siNA sense region
uaaaucuauauauagagau

SEQ ID NO: 179 - RNA, 19 nt, Artificial Sequence
  Description of Artificial Sequence:  Target Sequence/siNA sense region
uaucuuugucagcauugca

SEQ ID NO: 180 - RNA, 19 nt, Artificial Sequence
  Description of Artificial Sequence:  Target Sequence/siNA sense region
aucguuagcuucuccugau

SEQ ID NO: 181 - RNA, 19 nt, Artificial Sequence
  Description of Artificial Sequence:  Target Sequence/siNA sense region
uaaacuaauugccucacau

SEQ ID NO: 182 - RNA, 19 nt, Artificial Sequence
  Description of Artificial Sequence:  Target Sequence/siNA sense region
uugucacugcaaaucgaca

SEQ ID NO: 183 - RNA, 19 nt, Artificial Sequence
  Description of Artificial Sequence:  Target Sequence/siNA sense region
accuauuaaugggucucac

SEQ ID NO: 184 - RNA, 19 nt, Artificial Sequence
  Description of Artificial Sequence:  Target Sequence/siNA sense region
ccucccaacugcuuccccc

SEQ ID NO: 185 - RNA, 19 nt, Artificial Sequence
  Description of Artificial Sequence:  Target Sequence/siNA sense region
cucuguucuuccugcuagc

SEQ ID NO: 186 - RNA, 19 nt, Artificial Sequence
  Description of Artificial Sequence:  Target Sequence/siNA sense region
caugugccggcaacuuugu

SEQ ID NO: 187 - RNA, 19 nt, Artificial Sequence
  Description of Artificial Sequence:  Target Sequence/siNA sense region
uccacggacacaagugcga

SEQ ID NO: 188 - RNA, 19 nt, Artificial Sequence
  Description of Artificial Sequence:  Target Sequence/siNA sense region
auaucaccuuacaggagau

SEQ ID NO: 189 - RNA, 19 nt, Artificial Sequence
  Description of Artificial Sequence:  Target Sequence/siNA sense region
ucaucaaaacuuugaacag

SEQ ID NO: 190 - RNA, 19 nt, Artificial Sequence
  Description of Artificial Sequence:  Target Sequence/siNA sense region
gccucacagagcagaagac

SEQ ID NO: 191 - RNA, 19 nt, Artificial Sequence
  Description of Artificial Sequence:  Target Sequence/siNA sense region
cucugugcaccgaguugac

SEQ ID NO: 192 - RNA, 19 nt, Artificial Sequence
  Description of Artificial Sequence:  Target Sequence/siNA sense region
ccguaacagacaucuuugc

SEQ ID NO: 193 - RNA, 19 nt, Artificial Sequence
  Description of Artificial Sequence:  Target Sequence/siNA sense region
cugccuccaagaacacaac

SEQ ID NO: 194 - RNA, 19 nt, Artificial Sequence
  Description of Artificial Sequence:  Target Sequence/siNA sense region
cugagaaggaaaccuucug

SEQ ID NO: 195 - RNA, 19 nt, Artificial Sequence
  Description of Artificial Sequence:  Target Sequence/siNA sense region
gcagggcugcgacugugcu

SEQ ID NO: 196 - RNA, 19 nt, Artificial Sequence
  Description of Artificial Sequence:  Target Sequence/siNA sense region
uccggcaguucuacagcca

SEQ ID NO: 197 - RNA, 19 nt, Artificial Sequence
  Description of Artificial Sequence:  Target Sequence/siNA sense region
accaugagaaggacacucg

SEQ ID NO: 198 - RNA, 19 nt, Artificial Sequence
  Description of Artificial Sequence:  Target Sequence/siNA sense region
gcugccugggugcgacugc

SEQ ID NO: 199 - RNA, 19 nt, Artificial Sequence
  Description of Artificial Sequence:  Target Sequence/siNA sense region
cacagcaguuccacaggca

SEQ ID NO: 200 - RNA, 19 nt, Artificial Sequence
  Description of Artificial Sequence:  Target Sequence/siNA sense region
acaagcagcugauccgauu

SEQ ID NO: 201 - RNA, 19 nt, Artificial Sequence
  Description of Artificial Sequence:  Target Sequence/siNA sense region
uccugaaacggcucgacag

SEQ ID NO: 202 - RNA, 19 nt, Artificial Sequence
  Description of Artificial Sequence:  Target Sequence/siNA sense region
ggaaccucuggggccuggc

SEQ ID NO: 203 - RNA, 19 nt, Artificial Sequence
  Description of Artificial Sequence:  Target Sequence/siNA sense region
cgggcuugaauuccugucc

SEQ ID NO: 204 - RNA, 19 nt, Artificial Sequence
  Description of Artificial Sequence:  Target Sequence/siNA sense region
cugugaaggaagccaacca

SEQ ID NO: 205 - RNA, 19 nt, Artificial Sequence
  Description of Artificial Sequence:  Target Sequence/siNA sense region
agaguacguuggaaaacuu

SEQ ID NO: 206 - RNA, 19 nt, Artificial Sequence
  Description of Artificial Sequence:  Target Sequence/siNA sense region
ucuuggaaaggcuaaagac

SEQ ID NO: 207 - RNA, 19 nt, Artificial Sequence
  Description of Artificial Sequence:  Target Sequence/siNA sense region
cgaucaugagagagaaaua

SEQ ID NO: 208 - RNA, 19 nt, Artificial Sequence
  Description of Artificial Sequence:  Target Sequence/siNA sense region
auucaaaguguucgagcug

SEQ ID NO: 209 - RNA, 19 nt, Artificial Sequence
  Description of Artificial Sequence:  Target Sequence/siNA sense region
gaauauuuuaauuuaugag

SEQ ID NO: 210 - RNA, 19 nt, Artificial Sequence
  Description of Artificial Sequence:  Target Sequence/siNA sense region
guuuuugauagcuuuauuu

SEQ ID NO: 211 - RNA, 19 nt, Artificial Sequence
  Description of Artificial Sequence:  Target Sequence/siNA sense region
uuuuaaguauuuauauauu

SEQ ID NO: 212 - RNA, 19 nt, Artificial Sequence
  Description of Artificial Sequence:  Target Sequence/siNA sense region
uuauaacucaucauaaaau

SEQ ID NO: 213 - RNA, 19 nt, Artificial Sequence
  Description of Artificial Sequence:  Target Sequence/siNA sense region
aauaaaguauauauagaau

SEQ ID NO: 214 - RNA, 19 nt, Artificial Sequence
  Description of Artificial Sequence:  siNA antisense region
ggcuuuuugcuuugcauag

SEQ ID NO: 215 - RNA, 19 nt, Artificial Sequence
  Description of Artificial Sequence:  siNA antisense region
cagcuuggggcugcugcug

SEQ ID NO: 216 - RNA, 19 nt, Artificial Sequence
  Description of Artificial Sequence:  siNA antisense region
ucuuuagauuaaucuuauc

SEQ ID NO: 217 - RNA, 19 nt, Artificial Sequence
  Description of Artificial Sequence:  siNA antisense region
aauuacaccauaauuugcu

SEQ ID NO: 218 - RNA, 19 nt, Artificial Sequence
  Description of Artificial Sequence:  siNA antisense region
caaaguuucagcauaggaa

SEQ ID NO: 219 - RNA, 19 nt, Artificial Sequence
  Description of Artificial Sequence:  siNA antisense region
uuuuuaaaaaauuaacuac

SEQ ID NO: 220 - RNA, 19 nt, Artificial Sequence
  Description of Artificial Sequence:  siNA antisense region
caauaggaaaaugaaaccu

SEQ ID NO: 221 - RNA, 19 nt, Artificial Sequence
  Description of Artificial Sequence:  siNA antisense region
guuccugugaaaucagacc

SEQ ID NO: 222 - RNA, 19 nt, Artificial Sequence
  Description of Artificial Sequence:  siNA antisense region
cucacaaacagguaaaaug

SEQ ID NO: 223 - RNA, 19 nt, Artificial Sequence
  Description of Artificial Sequence:  siNA antisense region
uuccaggagaaaaaaugcc

SEQ ID NO: 224 - RNA, 19 nt, Artificial Sequence
  Description of Artificial Sequence:  siNA antisense region
ggccaaucagcaccucucu

SEQ ID NO: 225 - RNA, 19 nt, Artificial Sequence
  Description of Artificial Sequence:  siNA antisense region
agauugucagucacuuggg

SEQ ID NO: 226 - RNA, 19 nt, Artificial Sequence
  Description of Artificial Sequence:  siNA antisense region
ggaaauuuucguuacacca

SEQ ID NO: 227 - RNA, 19 nt, Artificial Sequence
  Description of Artificial Sequence:  siNA antisense region
ggaaaaugaguuuacauug

SEQ ID NO: 228 - RNA, 19 nt, Artificial Sequence
  Description of Artificial Sequence:  siNA antisense region
aaaauugcugaaaccgagg

SEQ ID NO: 229 - RNA, 19 nt, Artificial Sequence
  Description of Artificial Sequence:  siNA antisense region
aucucuauauauagauuua

SEQ ID NO: 230 - RNA, 19 nt, Artificial Sequence
  Description of Artificial Sequence:  siNA antisense region
ugcaaugcugacaaagaua

SEQ ID NO: 231 - RNA, 19 nt, Artificial Sequence
  Description of Artificial Sequence:  siNA antisense region
aucaggagaagcuaacgau

SEQ ID NO: 232 - RNA, 19 nt, Artificial Sequence
  Description of Artificial Sequence:  siNA antisense region
augugaggcaauuaguuua

SEQ ID NO: 233 - RNA, 19 nt, Artificial Sequence
  Description of Artificial Sequence:  siNA antisense region
ugucgauuugcagugacaa

SEQ ID NO: 234 - RNA, 19 nt, Artificial Sequence
  Description of Artificial Sequence:  siNA antisense region
gugagacccauuaauaggu

SEQ ID NO: 235 - RNA, 19 nt, Artificial Sequence
  Description of Artificial Sequence:  siNA antisense region
gggggaagcaguugggagg

SEQ ID NO: 236 - RNA, 19 nt, Artificial Sequence
  Description of Artificial Sequence:  siNA antisense region
gcuagcaggaagaacagag

SEQ ID NO: 237 - RNA, 19 nt, Artificial Sequence
  Description of Artificial Sequence:  siNA antisense region
acaaaguugccggcacaug

SEQ ID NO: 238 - RNA, 19 nt, Artificial Sequence
  Description of Artificial Sequence:  siNA antisense region
ucgcacuuguguccgugga

SEQ ID NO: 239 - RNA, 19 nt, Artificial Sequence
  Description of Artificial Sequence:  siNA antisense region
aucuccuguaaggugauau

SEQ ID NO: 240 - RNA, 19 nt, Artificial Sequence
  Description of Artificial Sequence:  siNA antisense region
cuguucaaaguuuugauga

SEQ ID NO: 241 - RNA, 19 nt, Artificial Sequence
  Description of Artificial Sequence:  siNA antisense region
gucuucugcucugugaggc

SEQ ID NO: 242 - RNA, 19 nt, Artificial Sequence
  Description of Artificial Sequence:  siNA antisense region
gucaacucggugcacagag

SEQ ID NO: 243 - RNA, 19 nt, Artificial Sequence
  Description of Artificial Sequence:  siNA antisense region
gcaaagaugucuguuacgg

SEQ ID NO: 244 - RNA, 19 nt, Artificial Sequence
  Description of Artificial Sequence:  siNA antisense region
guuguguucuuggaggcag

SEQ ID NO: 245 - RNA, 19 nt, Artificial Sequence
  Description of Artificial Sequence:  siNA antisense region
cagaagguuuccuucucag

SEQ ID NO: 246 - RNA, 19 nt, Artificial Sequence
  Description of Artificial Sequence:  siNA antisense region
agcacagucgcagcccugc

SEQ ID NO: 247 - RNA, 19 nt, Artificial Sequence
  Description of Artificial Sequence:  siNA antisense region
uggcuguagaacugccgga

SEQ ID NO: 248 - RNA, 19 nt, Artificial Sequence
  Description of Artificial Sequence:  siNA antisense region
cgaguguccuucucauggu

SEQ ID NO: 249 - RNA, 19 nt, Artificial Sequence
  Description of Artificial Sequence:  siNA antisense region
gcagucgcacccaggcagc

SEQ ID NO: 250 - RNA, 19 nt, Artificial Sequence
  Description of Artificial Sequence:  siNA antisense region
ugccuguggaacugcugug

SEQ ID NO: 251 - RNA, 19 nt, Artificial Sequence
  Description of Artificial Sequence:  siNA antisense region
aaucggaucagcugcuugu

SEQ ID NO: 252 - RNA, 19 nt, Artificial Sequence
  Description of Artificial Sequence:  siNA antisense region
cugucgagccguuucagga

SEQ ID NO: 253 - RNA, 19 nt, Artificial Sequence
  Description of Artificial Sequence:  siNA antisense region
gccaggccccagagguucc

SEQ ID NO: 254 - RNA, 19 nt, Artificial Sequence
  Description of Artificial Sequence:  siNA antisense region
ggacaggaauucaagcccg

SEQ ID NO: 255 - RNA, 19 nt, Artificial Sequence
  Description of Artificial Sequence:  siNA antisense region
ugguuggcuuccuucacag

SEQ ID NO: 256 - RNA, 19 nt, Artificial Sequence
  Description of Artificial Sequence:  siNA antisense region
aaguuuuccaacguacucu

SEQ ID NO: 257 - RNA, 19 nt, Artificial Sequence
  Description of Artificial Sequence:  siNA antisense region
gucuuuagccuuuccaaga

SEQ ID NO: 258 - RNA, 19 nt, Artificial Sequence
  Description of Artificial Sequence:  siNA antisense region
uauuucucucucaugaucg

SEQ ID NO: 259 - RNA, 19 nt, Artificial Sequence
  Description of Artificial Sequence:  siNA antisense region
cagcucgaacacuuugaau

SEQ ID NO: 260 - RNA, 19 nt, Artificial Sequence
  Description of Artificial Sequence:  siNA antisense region
cucauaaauuaaaauauuc

SEQ ID NO: 261 - RNA, 19 nt, Artificial Sequence
  Description of Artificial Sequence:  siNA antisense region
aaauaaagcuaucaaaaac

SEQ ID NO: 262 - RNA, 19 nt, Artificial Sequence
  Description of Artificial Sequence:  siNA antisense region
aauauauaaauacuuaaaa

SEQ ID NO: 263 - RNA, 19 nt, Artificial Sequence
  Description of Artificial Sequence:  siNA antisense region
auuuuaugaugaguuauaa

SEQ ID NO: 264 - RNA, 19 nt, Artificial Sequence
  Description of Artificial Sequence:  siNA antisense region
auucuauauauacuuuauu

SEQ ID NO: 265 - RNA, 19 nt, Artificial Sequence
  Description of Artificial Sequence:  Target Sequence/siNA sense region
cgaauggagcaggggcgcg

SEQ ID NO: 266 - RNA, 19 nt, Artificial Sequence
  Description of Artificial Sequence:  Target Sequence/siNA sense region
gcagauaauuaaagauuua

SEQ ID NO: 267 - RNA, 19 nt, Artificial Sequence
  Description of Artificial Sequence:  Target Sequence/siNA sense region
acacacagcuggaagaaau

SEQ ID NO: 268 - RNA, 19 nt, Artificial Sequence
  Description of Artificial Sequence:  Target Sequence/siNA sense region
ucauagagaagccgggcgu

SEQ ID NO: 269 - RNA, 19 nt, Artificial Sequence
  Description of Artificial Sequence:  Target Sequence/siNA sense region
ugguggcucaugccuauaa

SEQ ID NO: 270 - RNA, 19 nt, Artificial Sequence
  Description of Artificial Sequence:  Target Sequence/siNA sense region
aucccagcacuuuuggagg

SEQ ID NO: 271 - RNA, 19 nt, Artificial Sequence
  Description of Artificial Sequence:  Target Sequence/siNA sense region
gcugaggcgggcagaucac

SEQ ID NO: 272 - RNA, 19 nt, Artificial Sequence
  Description of Artificial Sequence:  Target Sequence/siNA sense region
cuugagaucaggaguucga

SEQ ID NO: 273 - RNA, 19 nt, Artificial Sequence
  Description of Artificial Sequence:  Target Sequence/siNA sense region
agaccagccuggugccuug

SEQ ID NO: 274 - RNA, 19 nt, Artificial Sequence
  Description of Artificial Sequence:  Target Sequence/siNA sense region
ggcaucucccaauggggug

SEQ ID NO: 275 - RNA, 19 nt, Artificial Sequence
  Description of Artificial Sequence:  Target Sequence/siNA sense region
ggcuuugcucugggcuccu

SEQ ID NO: 276 - RNA, 19 nt, Artificial Sequence
  Description of Artificial Sequence:  Target Sequence/siNA sense region
uguucccugugagcugccu

SEQ ID NO: 277 - RNA, 19 nt, Artificial Sequence
  Description of Artificial Sequence:  Target Sequence/siNA sense region
ugguccugcugcagguggc

SEQ ID NO: 278 - RNA, 19 nt, Artificial Sequence
  Description of Artificial Sequence:  Target Sequence/siNA sense region
caagcucugggaacaugaa

SEQ ID NO: 279 - RNA, 19 nt, Artificial Sequence
  Description of Artificial Sequence:  Target Sequence/siNA sense region
aggucuugcaggagcccac

SEQ ID NO: 280 - RNA, 19 nt, Artificial Sequence
  Description of Artificial Sequence:  Target Sequence/siNA sense region
ccugcgucuccgacuacau

SEQ ID NO: 281 - RNA, 19 nt, Artificial Sequence
  Description of Artificial Sequence:  Target Sequence/siNA sense region
ugagcaucucuacuugcga

SEQ ID NO: 282 - RNA, 19 nt, Artificial Sequence
  Description of Artificial Sequence:  Target Sequence/siNA sense region
aguggaagaugaauggucc

SEQ ID NO: 283 - RNA, 19 nt, Artificial Sequence
  Description of Artificial Sequence:  Target Sequence/siNA sense region
ccaccaauugcagcaccga

SEQ ID NO: 284 - RNA, 19 nt, Artificial Sequence
  Description of Artificial Sequence:  Target Sequence/siNA sense region
agcuccgccuguuguacca

SEQ ID NO: 285 - RNA, 19 nt, Artificial Sequence
  Description of Artificial Sequence:  Target Sequence/siNA sense region
agcugguuuuucugcucuc

SEQ ID NO: 286 - RNA, 19 nt, Artificial Sequence
  Description of Artificial Sequence:  Target Sequence/siNA sense region
ccgaagcccacacguguau

SEQ ID NO: 287 - RNA, 19 nt, Artificial Sequence
  Description of Artificial Sequence:  Target Sequence/siNA sense region
ucccugagaacaacggagg

SEQ ID NO: 288 - RNA, 19 nt, Artificial Sequence
  Description of Artificial Sequence:  Target Sequence/siNA sense region
gcgcggggugcgugugcca

SEQ ID NO: 289 - RNA, 19 nt, Artificial Sequence
  Description of Artificial Sequence:  Target Sequence/siNA sense region
accugcucauggaugacgu

SEQ ID NO: 290 - RNA, 19 nt, Artificial Sequence
  Description of Artificial Sequence:  Target Sequence/siNA sense region
uggucagugcggauaacua

SEQ ID NO: 291 - RNA, 19 nt, Artificial Sequence
  Description of Artificial Sequence:  Target Sequence/siNA sense region
auacacuggaccugugggc

SEQ ID NO: 292 - RNA, 19 nt, Artificial Sequence
  Description of Artificial Sequence:  Target Sequence/siNA sense region
cugggcagcagcugcugug

SEQ ID NO: 293 - RNA, 19 nt, Artificial Sequence
  Description of Artificial Sequence:  Target Sequence/siNA sense region
ggaagggcuccuucaagcc

SEQ ID NO: 294 - RNA, 19 nt, Artificial Sequence
  Description of Artificial Sequence:  Target Sequence/siNA sense region
ccagcgagcaugugaaacc

SEQ ID NO: 295 - RNA, 19 nt, Artificial Sequence
  Description of Artificial Sequence:  Target Sequence/siNA sense region
ccagggccccaggaaaccu

SEQ ID NO: 296 - RNA, 19 nt, Artificial Sequence
  Description of Artificial Sequence:  Target Sequence/siNA sense region
ugacaguucacaccaaugu

SEQ ID NO: 297 - RNA, 19 nt, Artificial Sequence
  Description of Artificial Sequence:  Target Sequence/siNA sense region
ucuccgacacucugcugcu

SEQ ID NO: 298 - RNA, 19 nt, Artificial Sequence
  Description of Artificial Sequence:  Target Sequence/siNA sense region
ugaccuggagcaacccgua

SEQ ID NO: 299 - RNA, 19 nt, Artificial Sequence
  Description of Artificial Sequence:  Target Sequence/siNA sense region
aucccccugacaauuaccu

SEQ ID NO: 300 - RNA, 19 nt, Artificial Sequence
  Description of Artificial Sequence:  Target Sequence/siNA sense region
uguauaaucaucucaccua

SEQ ID NO: 301 - RNA, 19 nt, Artificial Sequence
  Description of Artificial Sequence:  Target Sequence/siNA sense region
augcagucaacauuuggag

SEQ ID NO: 302 - RNA, 19 nt, Artificial Sequence
  Description of Artificial Sequence:  Target Sequence/siNA sense region
gugaaaacgacccggcaga

SEQ ID NO: 303 - RNA, 19 nt, Artificial Sequence
  Description of Artificial Sequence:  Target Sequence/siNA sense region
auuucagaaucuauaacgu

SEQ ID NO: 304 - RNA, 19 nt, Artificial Sequence
  Description of Artificial Sequence:  Target Sequence/siNA sense region
ugaccuaccuagaacccuc

SEQ ID NO: 305 - RNA, 19 nt, Artificial Sequence
  Description of Artificial Sequence:  Target Sequence/siNA sense region
cccuccgcaucgcagccag

SEQ ID NO: 306 - RNA, 19 nt, Artificial Sequence
  Description of Artificial Sequence:  Target Sequence/siNA sense region
gcacccugaagucugggau

SEQ ID NO: 307 - RNA, 19 nt, Artificial Sequence
  Description of Artificial Sequence:  Target Sequence/siNA sense region
uuuccuacagggcacgggu

SEQ ID NO: 308 - RNA, 19 nt, Artificial Sequence
  Description of Artificial Sequence:  Target Sequence/siNA sense region
ugagggccugggcucagug

SEQ ID NO: 309 - RNA, 19 nt, Artificial Sequence
  Description of Artificial Sequence:  Target Sequence/siNA sense region
gcuauaacaccaccuggag

SEQ ID NO: 310 - RNA, 19 nt, Artificial Sequence
  Description of Artificial Sequence:  Target Sequence/siNA sense region
gugaguggagccccagcac

SEQ ID NO: 311 - RNA, 19 nt, Artificial Sequence
  Description of Artificial Sequence:  Target Sequence/siNA sense region
ccaaguggcacaacuccua

SEQ ID NO: 312 - RNA, 19 nt, Artificial Sequence
  Description of Artificial Sequence:  Target Sequence/siNA sense region
acagggagcccuucgagca

SEQ ID NO: 313 - RNA, 19 nt, Artificial Sequence
  Description of Artificial Sequence:  Target Sequence/siNA sense region
agcaccuccugcugggcgu

SEQ ID NO: 314 - RNA, 19 nt, Artificial Sequence
  Description of Artificial Sequence:  Target Sequence/siNA sense region
ucagcguuuccugcauugu

SEQ ID NO: 315 - RNA, 19 nt, Artificial Sequence
  Description of Artificial Sequence:  Target Sequence/siNA sense region
ucauccuggccgucugccu

SEQ ID NO: 316 - RNA, 19 nt, Artificial Sequence
  Description of Artificial Sequence:  Target Sequence/siNA sense region
uguugugcuaugucagcau

SEQ ID NO: 317 - RNA, 19 nt, Artificial Sequence
  Description of Artificial Sequence:  Target Sequence/siNA sense region
ucaccaagauuaagaaaga

SEQ ID NO: 318 - RNA, 19 nt, Artificial Sequence
  Description of Artificial Sequence:  Target Sequence/siNA sense region
aauggugggaucagauucc

SEQ ID NO: 319 - RNA, 19 nt, Artificial Sequence
  Description of Artificial Sequence:  Target Sequence/siNA sense region
ccaacccagcccgcagccg

SEQ ID NO: 320 - RNA, 19 nt, Artificial Sequence
  Description of Artificial Sequence:  Target Sequence/siNA sense region
gccucguggcuauaauaau

SEQ ID NO: 321 - RNA, 19 nt, Artificial Sequence
  Description of Artificial Sequence:  Target Sequence/siNA sense region
uccaggaugcucagggguc

SEQ ID NO: 322 - RNA, 19 nt, Artificial Sequence
  Description of Artificial Sequence:  Target Sequence/siNA sense region
cacagugggagaagcgguc

SEQ ID NO: 323 - RNA, 19 nt, Artificial Sequence
  Description of Artificial Sequence:  Target Sequence/siNA sense region
cccgaggccaggaaccagc

SEQ ID NO: 324 - RNA, 19 nt, Artificial Sequence
  Description of Artificial Sequence:  Target Sequence/siNA sense region
ccaagugcccacacuggaa

SEQ ID NO: 325 - RNA, 19 nt, Artificial Sequence
  Description of Artificial Sequence:  Target Sequence/siNA sense region
agaauugucuuaccaagcu

SEQ ID NO: 326 - RNA, 19 nt, Artificial Sequence
  Description of Artificial Sequence:  Target Sequence/siNA sense region
ucuugcccuguuuucugga

SEQ ID NO: 327 - RNA, 19 nt, Artificial Sequence
  Description of Artificial Sequence:  Target Sequence/siNA sense region
agcacaacaugaaaaggga

SEQ ID NO: 328 - RNA, 19 nt, Artificial Sequence
  Description of Artificial Sequence:  Target Sequence/siNA sense region
augaagauccucacaaggc

SEQ ID NO: 329 - RNA, 19 nt, Artificial Sequence
  Description of Artificial Sequence:  Target Sequence/siNA sense region
cugccaaagagaugccuuu

SEQ ID NO: 330 - RNA, 19 nt, Artificial Sequence
  Description of Artificial Sequence:  Target Sequence/siNA sense region
uccagggcucuggaaaauc

SEQ ID NO: 331 - RNA, 19 nt, Artificial Sequence
  Description of Artificial Sequence:  Target Sequence/siNA sense region
cagcauggugcccagugga

SEQ ID NO: 332 - RNA, 19 nt, Artificial Sequence
  Description of Artificial Sequence:  Target Sequence/siNA sense region
agaucagcaagacaguccu

SEQ ID NO: 333 - RNA, 19 nt, Artificial Sequence
  Description of Artificial Sequence:  Target Sequence/siNA sense region
ucuggccagagagcaucag

SEQ ID NO: 334 - RNA, 19 nt, Artificial Sequence
  Description of Artificial Sequence:  Target Sequence/siNA sense region
gcguggugcgaugugugga

SEQ ID NO: 335 - RNA, 19 nt, Artificial Sequence
  Description of Artificial Sequence:  Target Sequence/siNA sense region
aguuguuugaggccccggu

SEQ ID NO: 336 - RNA, 19 nt, Artificial Sequence
  Description of Artificial Sequence:  Target Sequence/siNA sense region
uggagugugaggaggagga

SEQ ID NO: 337 - RNA, 19 nt, Artificial Sequence
  Description of Artificial Sequence:  Target Sequence/siNA sense region
aggagguagaggaagaaaa

SEQ ID NO: 338 - RNA, 19 nt, Artificial Sequence
  Description of Artificial Sequence:  Target Sequence/siNA sense region
aagggagcuucugugcauc

SEQ ID NO: 339 - RNA, 19 nt, Artificial Sequence
  Description of Artificial Sequence:  Target Sequence/siNA sense region
cgccugagagcagcaggga

SEQ ID NO: 340 - RNA, 19 nt, Artificial Sequence
  Description of Artificial Sequence:  Target Sequence/siNA sense region
augacuuccaggagggaag

SEQ ID NO: 341 - RNA, 19 nt, Artificial Sequence
  Description of Artificial Sequence:  Target Sequence/siNA sense region
gggagggcauuguggcccg

SEQ ID NO: 342 - RNA, 19 nt, Artificial Sequence
  Description of Artificial Sequence:  Target Sequence/siNA sense region
ggcuaacagagagccuguu

SEQ ID NO: 343 - RNA, 19 nt, Artificial Sequence
  Description of Artificial Sequence:  Target Sequence/siNA sense region
uccuggaccugcucggaga

SEQ ID NO: 344 - RNA, 19 nt, Artificial Sequence
  Description of Artificial Sequence:  Target Sequence/siNA sense region
aggagaaugggggcuuuug

SEQ ID NO: 345 - RNA, 19 nt, Artificial Sequence
  Description of Artificial Sequence:  Target Sequence/siNA sense region
gccagcaggacauggggga

SEQ ID NO: 346 - RNA, 19 nt, Artificial Sequence
  Description of Artificial Sequence:  Target Sequence/siNA sense region
agucaugccuucuuccacc

SEQ ID NO: 347 - RNA, 19 nt, Artificial Sequence
  Description of Artificial Sequence:  Target Sequence/siNA sense region
cuucgggaaguacgagugc

SEQ ID NO: 348 - RNA, 19 nt, Artificial Sequence
  Description of Artificial Sequence:  Target Sequence/siNA sense region
cucacaugcccugggauga

SEQ ID NO: 349 - RNA, 19 nt, Artificial Sequence
  Description of Artificial Sequence:  Target Sequence/siNA sense region
aguucccaagugcagggcc

SEQ ID NO: 350 - RNA, 19 nt, Artificial Sequence
  Description of Artificial Sequence:  Target Sequence/siNA sense region
ccaaggaggcaccucccug

SEQ ID NO: 351 - RNA, 19 nt, Artificial Sequence
  Description of Artificial Sequence:  Target Sequence/siNA sense region
ggggcaaggagcagccucu

SEQ ID NO: 352 - RNA, 19 nt, Artificial Sequence
  Description of Artificial Sequence:  Target Sequence/siNA sense region
uccaccuggagccaagucc

SEQ ID NO: 353 - RNA, 19 nt, Artificial Sequence
  Description of Artificial Sequence:  Target Sequence/siNA sense region
cuccugccagcccgaccca

SEQ ID NO: 354 - RNA, 19 nt, Artificial Sequence
  Description of Artificial Sequence:  Target Sequence/siNA sense region
agaguccagacaaccugac

SEQ ID NO: 355 - RNA, 19 nt, Artificial Sequence
  Description of Artificial Sequence:  Target Sequence/siNA sense region
cuugcacagagacgccccu

SEQ ID NO: 356 - RNA, 19 nt, Artificial Sequence
  Description of Artificial Sequence:  Target Sequence/siNA sense region
ucgucaucgcaggcaaccc

SEQ ID NO: 357 - RNA, 19 nt, Artificial Sequence
  Description of Artificial Sequence:  Target Sequence/siNA sense region
cugcuuaccgcagcuucag

SEQ ID NO: 358 - RNA, 19 nt, Artificial Sequence
  Description of Artificial Sequence:  Target Sequence/siNA sense region
gcaacucccugagccaguc

SEQ ID NO: 359 - RNA, 19 nt, Artificial Sequence
  Description of Artificial Sequence:  Target Sequence/siNA sense region
caccgugucccagagagcu

SEQ ID NO: 360 - RNA, 19 nt, Artificial Sequence
  Description of Artificial Sequence:  Target Sequence/siNA sense region
uggguccagacccacugcu

SEQ ID NO: 361 - RNA, 19 nt, Artificial Sequence
  Description of Artificial Sequence:  Target Sequence/siNA sense region
uggccagacaccuggagga

SEQ ID NO: 362 - RNA, 19 nt, Artificial Sequence
  Description of Artificial Sequence:  Target Sequence/siNA sense region
aaguagaacccgagaugcc

SEQ ID NO: 363 - RNA, 19 nt, Artificial Sequence
  Description of Artificial Sequence:  Target Sequence/siNA sense region
ccugugucccccagcucuc

SEQ ID NO: 364 - RNA, 19 nt, Artificial Sequence
  Description of Artificial Sequence:  Target Sequence/siNA sense region
cugagccaaccacugugcc

SEQ ID NO: 365 - RNA, 19 nt, Artificial Sequence
  Description of Artificial Sequence:  Target Sequence/siNA sense region
cccaaccugagccagaaac

SEQ ID NO: 366 - RNA, 19 nt, Artificial Sequence
  Description of Artificial Sequence:  Target Sequence/siNA sense region
ccugggagcagauccuccg

SEQ ID NO: 367 - RNA, 19 nt, Artificial Sequence
  Description of Artificial Sequence:  Target Sequence/siNA sense region
gccgaaauguccuccagca

SEQ ID NO: 368 - RNA, 19 nt, Artificial Sequence
  Description of Artificial Sequence:  Target Sequence/siNA sense region
auggggcagcugcagcccc

SEQ ID NO: 369 - RNA, 19 nt, Artificial Sequence
  Description of Artificial Sequence:  Target Sequence/siNA sense region
ccgucucggcccccaccag

SEQ ID NO: 370 - RNA, 19 nt, Artificial Sequence
  Description of Artificial Sequence:  Target Sequence/siNA sense region
guggcuaucaggaguuugu

SEQ ID NO: 371 - RNA, 19 nt, Artificial Sequence
  Description of Artificial Sequence:  Target Sequence/siNA sense region
uacaugcgguggagcaggg

SEQ ID NO: 372 - RNA, 19 nt, Artificial Sequence
  Description of Artificial Sequence:  Target Sequence/siNA sense region
guggcacccaggccagugc

SEQ ID NO: 373 - RNA, 19 nt, Artificial Sequence
  Description of Artificial Sequence:  Target Sequence/siNA sense region
cgguggugggcuugggucc

SEQ ID NO: 374 - RNA, 19 nt, Artificial Sequence
  Description of Artificial Sequence:  Target Sequence/siNA sense region
ccccaggagaggcugguua

SEQ ID NO: 375 - RNA, 19 nt, Artificial Sequence
  Description of Artificial Sequence:  Target Sequence/siNA sense region
acaaggccuucucaagccu

SEQ ID NO: 376 - RNA, 19 nt, Artificial Sequence
  Description of Artificial Sequence:  Target Sequence/siNA sense region
ugcuugccagcagugcugu

SEQ ID NO: 377 - RNA, 19 nt, Artificial Sequence
  Description of Artificial Sequence:  Target Sequence/siNA sense region
uguccccagagaaaugugg

SEQ ID NO: 378 - RNA, 19 nt, Artificial Sequence
  Description of Artificial Sequence:  Target Sequence/siNA sense region
gguuuggggcuagcagugg

SEQ ID NO: 379 - RNA, 19 nt, Artificial Sequence
  Description of Artificial Sequence:  Target Sequence/siNA sense region
gggaagagggguauaagcc

SEQ ID NO: 380 - RNA, 19 nt, Artificial Sequence
  Description of Artificial Sequence:  Target Sequence/siNA sense region
cuuuccaagaccucauucc

SEQ ID NO: 381 - RNA, 19 nt, Artificial Sequence
  Description of Artificial Sequence:  Target Sequence/siNA sense region
cuggcugcccuggggaccc

SEQ ID NO: 382 - RNA, 19 nt, Artificial Sequence
  Description of Artificial Sequence:  Target Sequence/siNA sense region
cugccccagucccuguccc

SEQ ID NO: 383 - RNA, 19 nt, Artificial Sequence
  Description of Artificial Sequence:  Target Sequence/siNA sense region
ccuuguucaccuuuggacu

SEQ ID NO: 384 - RNA, 19 nt, Artificial Sequence
  Description of Artificial Sequence:  Target Sequence/siNA sense region
uggacagggagccaccucg

SEQ ID NO: 385 - RNA, 19 nt, Artificial Sequence
  Description of Artificial Sequence:  Target Sequence/siNA sense region
gcaguccgcagagcucaca

SEQ ID NO: 386 - RNA, 19 nt, Artificial Sequence
  Description of Artificial Sequence:  Target Sequence/siNA sense region
aucucccaagcagcucccc

SEQ ID NO: 387 - RNA, 19 nt, Artificial Sequence
  Description of Artificial Sequence:  Target Sequence/siNA sense region
cagagcaccugggucugga

SEQ ID NO: 388 - RNA, 19 nt, Artificial Sequence
  Description of Artificial Sequence:  Target Sequence/siNA sense region
agccgggggaaaagguaga

SEQ ID NO: 389 - RNA, 19 nt, Artificial Sequence
  Description of Artificial Sequence:  Target Sequence/siNA sense region
aggacaugccaaagccccc

SEQ ID NO: 390 - RNA, 19 nt, Artificial Sequence
  Description of Artificial Sequence:  Target Sequence/siNA sense region
cacuuccccaggagcaggc

SEQ ID NO: 391 - RNA, 19 nt, Artificial Sequence
  Description of Artificial Sequence:  Target Sequence/siNA sense region
ccacagacccccuugugga

SEQ ID NO: 392 - RNA, 19 nt, Artificial Sequence
  Description of Artificial Sequence:  Target Sequence/siNA sense region
acagccugggcaguggcau

SEQ ID NO: 393 - RNA, 19 nt, Artificial Sequence
  Description of Artificial Sequence:  Target Sequence/siNA sense region
uugucuacucagcccuuac

SEQ ID NO: 394 - RNA, 19 nt, Artificial Sequence
  Description of Artificial Sequence:  Target Sequence/siNA sense region
ccugccaccugugcggcca

SEQ ID NO: 395 - RNA, 19 nt, Artificial Sequence
  Description of Artificial Sequence:  Target Sequence/siNA sense region
accugaaacagugucaugg

SEQ ID NO: 396 - RNA, 19 nt, Artificial Sequence
  Description of Artificial Sequence:  Target Sequence/siNA sense region
gccaggaggaugguggcca

SEQ ID NO: 397 - RNA, 19 nt, Artificial Sequence
  Description of Artificial Sequence:  Target Sequence/siNA sense region
agaccccugucauggccag

SEQ ID NO: 398 - RNA, 19 nt, Artificial Sequence
  Description of Artificial Sequence:  Target Sequence/siNA sense region
guccuugcuguggcugcug

SEQ ID NO: 399 - RNA, 19 nt, Artificial Sequence
  Description of Artificial Sequence:  Target Sequence/siNA sense region
gcuguggagacagguccuc

SEQ ID NO: 400 - RNA, 19 nt, Artificial Sequence
  Description of Artificial Sequence:  Target Sequence/siNA sense region
cgcccccuacaaccccccu

SEQ ID NO: 401 - RNA, 19 nt, Artificial Sequence
  Description of Artificial Sequence:  Target Sequence/siNA sense region
ugagggccccagaccccuc

SEQ ID NO: 402 - RNA, 19 nt, Artificial Sequence
  Description of Artificial Sequence:  Target Sequence/siNA sense region
cuccaggugggguuccacu

SEQ ID NO: 403 - RNA, 19 nt, Artificial Sequence
  Description of Artificial Sequence:  Target Sequence/siNA sense region
uggaggccagucugugucc

SEQ ID NO: 404 - RNA, 19 nt, Artificial Sequence
  Description of Artificial Sequence:  Target Sequence/siNA sense region
cggccucccuggcacccuc

SEQ ID NO: 405 - RNA, 19 nt, Artificial Sequence
  Description of Artificial Sequence:  Target Sequence/siNA sense region
cgggcaucucagagaagag

SEQ ID NO: 406 - RNA, 19 nt, Artificial Sequence
  Description of Artificial Sequence:  Target Sequence/siNA sense region
guaaauccucaucauccuu

SEQ ID NO: 407 - RNA, 19 nt, Artificial Sequence
  Description of Artificial Sequence:  Target Sequence/siNA sense region
uccauccugccccuggcaa

SEQ ID NO: 408 - RNA, 19 nt, Artificial Sequence
  Description of Artificial Sequence:  Target Sequence/siNA sense region
augcucagagcucaagcca

SEQ ID NO: 409 - RNA, 19 nt, Artificial Sequence
  Description of Artificial Sequence:  Target Sequence/siNA sense region
agacccccaaaaucgugaa

SEQ ID NO: 410 - RNA, 19 nt, Artificial Sequence
  Description of Artificial Sequence:  Target Sequence/siNA sense region
acuuugucuccgugggacc

SEQ ID NO: 411 - RNA, 19 nt, Artificial Sequence
  Description of Artificial Sequence:  Target Sequence/siNA sense region
ccacauacaugagggucuc

SEQ ID NO: 412 - RNA, 19 nt, Artificial Sequence
  Description of Artificial Sequence:  Target Sequence/siNA sense region
cuuaggugcauguccucuu

SEQ ID NO: 413 - RNA, 19 nt, Artificial Sequence
  Description of Artificial Sequence:  Target Sequence/siNA sense region
uguugcugagucugcagau

SEQ ID NO: 414 - RNA, 19 nt, Artificial Sequence
  Description of Artificial Sequence:  Target Sequence/siNA sense region
ugaggacuagggcuuaucc

SEQ ID NO: 415 - RNA, 19 nt, Artificial Sequence
  Description of Artificial Sequence:  Target Sequence/siNA sense region
caugccugggaaaugccac

SEQ ID NO: 416 - RNA, 19 nt, Artificial Sequence
  Description of Artificial Sequence:  Target Sequence/siNA sense region
ccuccuggaaggcagccag

SEQ ID NO: 417 - RNA, 19 nt, Artificial Sequence
  Description of Artificial Sequence:  Target Sequence/siNA sense region
ggcuggcagauuuccaaaa

SEQ ID NO: 418 - RNA, 19 nt, Artificial Sequence
  Description of Artificial Sequence:  Target Sequence/siNA sense region
agacuugaagaaccauggu

SEQ ID NO: 419 - RNA, 19 nt, Artificial Sequence
  Description of Artificial Sequence:  Target Sequence/siNA sense region
uaugaaggugauuggcccc

SEQ ID NO: 420 - RNA, 19 nt, Artificial Sequence
  Description of Artificial Sequence:  Target Sequence/siNA sense region
cacugacguuggccuaaca

SEQ ID NO: 421 - RNA, 19 nt, Artificial Sequence
  Description of Artificial Sequence:  Target Sequence/siNA sense region
acugggcugcagagacugg

SEQ ID NO: 422 - RNA, 19 nt, Artificial Sequence
  Description of Artificial Sequence:  Target Sequence/siNA sense region
gaccccgcccagcauuggg

SEQ ID NO: 423 - RNA, 19 nt, Artificial Sequence
  Description of Artificial Sequence:  Target Sequence/siNA sense region
gcugggcucgccacauccc

SEQ ID NO: 424 - RNA, 19 nt, Artificial Sequence
  Description of Artificial Sequence:  Target Sequence/siNA sense region
caugagaguagagggcacu

SEQ ID NO: 425 - RNA, 19 nt, Artificial Sequence
  Description of Artificial Sequence:  Target Sequence/siNA sense region
ugggucgccgugccccacg

SEQ ID NO: 426 - RNA, 19 nt, Artificial Sequence
  Description of Artificial Sequence:  Target Sequence/siNA sense region
ggcaggccccugcaggaaa

SEQ ID NO: 427 - RNA, 19 nt, Artificial Sequence
  Description of Artificial Sequence:  Target Sequence/siNA sense region
aacugaggcccuugggcac

SEQ ID NO: 428 - RNA, 19 nt, Artificial Sequence
  Description of Artificial Sequence:  Target Sequence/siNA sense region
ccucgacuugugaacgagu

SEQ ID NO: 429 - RNA, 19 nt, Artificial Sequence
  Description of Artificial Sequence:  Target Sequence/siNA sense region
uuguuggcugcucccucca

SEQ ID NO: 430 - RNA, 19 nt, Artificial Sequence
  Description of Artificial Sequence:  Target Sequence/siNA sense region
acagcuucugcagcagacu

SEQ ID NO: 431 - RNA, 19 nt, Artificial Sequence
  Description of Artificial Sequence:  Target Sequence/siNA sense region
ugucccuguuguaacugcc

SEQ ID NO: 432 - RNA, 19 nt, Artificial Sequence
  Description of Artificial Sequence:  Target Sequence/siNA sense region
ccaaggcauguuuugccca

SEQ ID NO: 433 - RNA, 19 nt, Artificial Sequence
  Description of Artificial Sequence:  Target Sequence/siNA sense region
accagaucauggcccacgu

SEQ ID NO: 434 - RNA, 19 nt, Artificial Sequence
  Description of Artificial Sequence:  Target Sequence/siNA sense region
uggaggcccaccugccucu

SEQ ID NO: 435 - RNA, 19 nt, Artificial Sequence
  Description of Artificial Sequence:  Target Sequence/siNA sense region
ugucucacugaacuagaag

SEQ ID NO: 436 - RNA, 19 nt, Artificial Sequence
  Description of Artificial Sequence:  Target Sequence/siNA sense region
gccgagccuagaaacuaac

SEQ ID NO: 437 - RNA, 19 nt, Artificial Sequence
  Description of Artificial Sequence:  Target Sequence/siNA sense region
cacagccaucaagggaaug

SEQ ID NO: 438 - RNA, 19 nt, Artificial Sequence
  Description of Artificial Sequence:  Target Sequence/siNA sense region
gacuugggcggccuuggga

SEQ ID NO: 439 - RNA, 19 nt, Artificial Sequence
  Description of Artificial Sequence:  Target Sequence/siNA sense region
aaaucgaugagaaauugaa

SEQ ID NO: 440 - RNA, 19 nt, Artificial Sequence
  Description of Artificial Sequence:  Target Sequence/siNA sense region
acuucagggagggugguca

SEQ ID NO: 441 - RNA, 19 nt, Artificial Sequence
  Description of Artificial Sequence:  Target Sequence/siNA sense region
auugccuagaggugcucau

SEQ ID NO: 442 - RNA, 19 nt, Artificial Sequence
  Description of Artificial Sequence:  Target Sequence/siNA sense region
uucauuuaacagagcuucc

SEQ ID NO: 443 - RNA, 19 nt, Artificial Sequence
  Description of Artificial Sequence:  Target Sequence/siNA sense region
cuuagguugaugcuggagg

SEQ ID NO: 444 - RNA, 19 nt, Artificial Sequence
  Description of Artificial Sequence:  Target Sequence/siNA sense region
gcagaaucccggcugucaa

SEQ ID NO: 445 - RNA, 19 nt, Artificial Sequence
  Description of Artificial Sequence:  Target Sequence/siNA sense region
agggguguucaguuaaggg

SEQ ID NO: 446 - RNA, 19 nt, Artificial Sequence
  Description of Artificial Sequence:  Target Sequence/siNA sense region
ggagcaacagaggacauga

SEQ ID NO: 447 - RNA, 19 nt, Artificial Sequence
  Description of Artificial Sequence:  Target Sequence/siNA sense region
aaaaauugcuaugacuaaa

SEQ ID NO: 448 - RNA, 19 nt, Artificial Sequence
  Description of Artificial Sequence:  Target Sequence/siNA sense region
agcagggacaauuugcugc

SEQ ID NO: 449 - RNA, 19 nt, Artificial Sequence
  Description of Artificial Sequence:  Target Sequence/siNA sense region
ccaaacacccaugcccagc

SEQ ID NO: 450 - RNA, 19 nt, Artificial Sequence
  Description of Artificial Sequence:  Target Sequence/siNA sense region
cuguauggcugggggcucc

SEQ ID NO: 451 - RNA, 19 nt, Artificial Sequence
  Description of Artificial Sequence:  Target Sequence/siNA sense region
cucguaugcauggaacccc

SEQ ID NO: 452 - RNA, 19 nt, Artificial Sequence
  Description of Artificial Sequence:  Target Sequence/siNA sense region
ccagaauaaauaugcucag

SEQ ID NO: 453 - RNA, 19 nt, Artificial Sequence
  Description of Artificial Sequence:  Target Sequence/siNA sense region
gccacccugugggccgggc

SEQ ID NO: 454 - RNA, 19 nt, Artificial Sequence
  Description of Artificial Sequence:  Target Sequence/siNA sense region
caauccagacagcaggcau

SEQ ID NO: 455 - RNA, 19 nt, Artificial Sequence
  Description of Artificial Sequence:  Target Sequence/siNA sense region
uaaggcaccaguuacccug

SEQ ID NO: 456 - RNA, 19 nt, Artificial Sequence
  Description of Artificial Sequence:  Target Sequence/siNA sense region
gcauguuggcccagaccuc

SEQ ID NO: 457 - RNA, 19 nt, Artificial Sequence
  Description of Artificial Sequence:  Target Sequence/siNA sense region
caggugcuagggaaggcgg

SEQ ID NO: 458 - RNA, 19 nt, Artificial Sequence
  Description of Artificial Sequence:  Target Sequence/siNA sense region
ggaaccuuggguugaguaa

SEQ ID NO: 459 - RNA, 19 nt, Artificial Sequence
  Description of Artificial Sequence:  Target Sequence/siNA sense region
augcucgucuguguguuuu

SEQ ID NO: 460 - RNA, 19 nt, Artificial Sequence
  Description of Artificial Sequence:  Target Sequence/siNA sense region
uaguuucaucaccuguuau

SEQ ID NO: 461 - RNA, 19 nt, Artificial Sequence
  Description of Artificial Sequence:  Target Sequence/siNA sense region
ucuguguuugcugaggaga

SEQ ID NO: 462 - RNA, 19 nt, Artificial Sequence
  Description of Artificial Sequence:  Target Sequence/siNA sense region
aguggaacagaaggggugg

SEQ ID NO: 463 - RNA, 19 nt, Artificial Sequence
  Description of Artificial Sequence:  Target Sequence/siNA sense region
gaguuuuguauaaauaaag

SEQ ID NO: 464 - RNA, 19 nt, Artificial Sequence
  Description of Artificial Sequence:  Target Sequence/siNA sense region
uaaauaaaguuucuuuguc

SEQ ID NO: 465 - RNA, 19 nt, Artificial Sequence
  Description of Artificial Sequence:  siNA antisense region
cgcgccccugcuccauucg

SEQ ID NO: 466 - RNA, 19 nt, Artificial Sequence
  Description of Artificial Sequence:  siNA antisense region
uaaaucuuuaauuaucugc

SEQ ID NO: 467 - RNA, 19 nt, Artificial Sequence
  Description of Artificial Sequence:  siNA antisense region
auuucuuccagcugugugu

SEQ ID NO: 468 - RNA, 19 nt, Artificial Sequence
  Description of Artificial Sequence:  siNA antisense region
acgcccggcuucucuauga

SEQ ID NO: 469 - RNA, 19 nt, Artificial Sequence
  Description of Artificial Sequence:  siNA antisense region
uuauaggcaugagccacca

SEQ ID NO: 470 - RNA, 19 nt, Artificial Sequence
  Description of Artificial Sequence:  siNA antisense region
ccuccaaaagugcugggau

SEQ ID NO: 471 - RNA, 19 nt, Artificial Sequence
  Description of Artificial Sequence:  siNA antisense region
gugaucugcccgccucagc

SEQ ID NO: 472 - RNA, 19 nt, Artificial Sequence
  Description of Artificial Sequence:  siNA antisense region
ucgaacuccugaucucaag

SEQ ID NO: 473 - RNA, 19 nt, Artificial Sequence
  Description of Artificial Sequence:  siNA antisense region
caaggcaccaggcuggucu

SEQ ID NO: 474 - RNA, 19 nt, Artificial Sequence
  Description of Artificial Sequence:  siNA antisense region
caccccauugggagaugcc

SEQ ID NO: 475 - RNA, 19 nt, Artificial Sequence
  Description of Artificial Sequence:  siNA antisense region
aggagcccagagcaaagcc

SEQ ID NO: 476 - RNA, 19 nt, Artificial Sequence
  Description of Artificial Sequence:  siNA antisense region
aggcagcucacagggaaca

SEQ ID NO: 477 - RNA, 19 nt, Artificial Sequence
  Description of Artificial Sequence:  siNA antisense region
gccaccugcagcaggacca

SEQ ID NO: 478 - RNA, 19 nt, Artificial Sequence
  Description of Artificial Sequence:  siNA antisense region
uucauguucccagagcuug

SEQ ID NO: 479 - RNA, 19 nt, Artificial Sequence
  Description of Artificial Sequence:  siNA antisense region
gugggcuccugcaagaccu

SEQ ID NO: 480 - RNA, 19 nt, Artificial Sequence
  Description of Artificial Sequence:  siNA antisense region
auguagucggagacgcagg

SEQ ID NO: 481 - RNA, 19 nt, Artificial Sequence
  Description of Artificial Sequence:  siNA antisense region
ucgcaaguagagaugcuca

SEQ ID NO: 482 - RNA, 19 nt, Artificial Sequence
  Description of Artificial Sequence:  siNA antisense region
ggaccauucaucuuccacu

SEQ ID NO: 483 - RNA, 19 nt, Artificial Sequence
  Description of Artificial Sequence:  siNA antisense region
ucggugcugcaauuggugg

SEQ ID NO: 484 - RNA, 19 nt, Artificial Sequence
  Description of Artificial Sequence:  siNA antisense region
ugguacaacaggcggagcu

SEQ ID NO: 485 - RNA, 19 nt, Artificial Sequence
  Description of Artificial Sequence:  siNA antisense region
gagagcagaaaaaccagcu

SEQ ID NO: 486 - RNA, 19 nt, Artificial Sequence
  Description of Artificial Sequence:  siNA antisense region
auacacgugugggcuucgg

SEQ ID NO: 487 - RNA, 19 nt, Artificial Sequence
  Description of Artificial Sequence:  siNA antisense region
ccuccguuguucucaggga

SEQ ID NO: 488 - RNA, 19 nt, Artificial Sequence
  Description of Artificial Sequence:  siNA antisense region
uggcacacgcaccccgcgc

SEQ ID NO: 489 - RNA, 19 nt, Artificial Sequence
  Description of Artificial Sequence:  siNA antisense region
acgucauccaugagcaggu

SEQ ID NO: 490 - RNA, 19 nt, Artificial Sequence
  Description of Artificial Sequence:  siNA antisense region
uaguuauccgcacugacca

SEQ ID NO: 491 - RNA, 19 nt, Artificial Sequence
  Description of Artificial Sequence:  siNA antisense region
gcccacagguccaguguau

SEQ ID NO: 492 - RNA, 19 nt, Artificial Sequence
  Description of Artificial Sequence:  siNA antisense region
cacagcagcugcugcccag

SEQ ID NO: 493 - RNA, 19 nt, Artificial Sequence
  Description of Artificial Sequence:  siNA antisense region
ggcuugaaggagcccuucc

SEQ ID NO: 494 - RNA, 19 nt, Artificial Sequence
  Description of Artificial Sequence:  siNA antisense region
gguuucacaugcucgcugg

SEQ ID NO: 495 - RNA, 19 nt, Artificial Sequence
  Description of Artificial Sequence:  siNA antisense region
agguuuccuggggcccugg

SEQ ID NO: 496 - RNA, 19 nt, Artificial Sequence
  Description of Artificial Sequence:  siNA antisense region
acauuggugugaacuguca

SEQ ID NO: 497 - RNA, 19 nt, Artificial Sequence
  Description of Artificial Sequence:  siNA antisense region
agcagcagagugucggaga

SEQ ID NO: 498 - RNA, 19 nt, Artificial Sequence
  Description of Artificial Sequence:  siNA antisense region
uacggguugcuccagguca

SEQ ID NO: 499 - RNA, 19 nt, Artificial Sequence
  Description of Artificial Sequence:  siNA antisense region
agguaauugucagggggau

SEQ ID NO: 500 - RNA, 19 nt, Artificial Sequence
  Description of Artificial Sequence:  siNA antisense region
uaggugagaugauuauaca

SEQ ID NO: 501 - RNA, 19 nt, Artificial Sequence
  Description of Artificial Sequence:  siNA antisense region
cuccaaauguugacugcau

SEQ ID NO: 502 - RNA, 19 nt, Artificial Sequence
  Description of Artificial Sequence:  siNA antisense region
ucugccgggucguuuucac

SEQ ID NO: 503 - RNA, 19 nt, Artificial Sequence
  Description of Artificial Sequence:  siNA antisense region
acguuauagauucugaaau

SEQ ID NO: 504 - RNA, 19 nt, Artificial Sequence
  Description of Artificial Sequence:  siNA antisense region
gaggguucuagguagguca

SEQ ID NO: 505 - RNA, 19 nt, Artificial Sequence
  Description of Artificial Sequence:  siNA antisense region
cuggcugcgaugcggaggg

SEQ ID NO: 506 - RNA, 19 nt, Artificial Sequence
  Description of Artificial Sequence:  siNA antisense region
aucccagacuucagggugc

SEQ ID NO: 507 - RNA, 19 nt, Artificial Sequence
  Description of Artificial Sequence:  siNA antisense region
acccgugcccuguaggaaa

SEQ ID NO: 508 - RNA, 19 nt, Artificial Sequence
  Description of Artificial Sequence:  siNA antisense region
cacugagcccaggcccuca

SEQ ID NO: 509 - RNA, 19 nt, Artificial Sequence
  Description of Artificial Sequence:  siNA antisense region
cuccaggugguguuauagc

SEQ ID NO: 510 - RNA, 19 nt, Artificial Sequence
  Description of Artificial Sequence:  siNA antisense region
gugcuggggcuccacucac

SEQ ID NO: 511 - RNA, 19 nt, Artificial Sequence
  Description of Artificial Sequence:  siNA antisense region
uaggaguugugccacuugg

SEQ ID NO: 512 - RNA, 19 nt, Artificial Sequence
  Description of Artificial Sequence:  siNA antisense region
ugcucgaagggcucccugu

SEQ ID NO: 513 - RNA, 19 nt, Artificial Sequence
  Description of Artificial Sequence:  siNA antisense region
acgcccagcaggaggugcu

SEQ ID NO: 514 - RNA, 19 nt, Artificial Sequence
  Description of Artificial Sequence:  siNA antisense region
acaaugcaggaaacgcuga

SEQ ID NO: 515 - RNA, 19 nt, Artificial Sequence
  Description of Artificial Sequence:  siNA antisense region
aggcagacggccaggauga

SEQ ID NO: 516 - RNA, 19 nt, Artificial Sequence
  Description of Artificial Sequence:  siNA antisense region
augcugacauagcacaaca

SEQ ID NO: 517 - RNA, 19 nt, Artificial Sequence
  Description of Artificial Sequence:  siNA antisense region
ucuuucuuaaucuugguga

SEQ ID NO: 518 - RNA, 19 nt, Artificial Sequence
  Description of Artificial Sequence:  siNA antisense region
ggaaucugaucccaccauu

SEQ ID NO: 519 - RNA, 19 nt, Artificial Sequence
  Description of Artificial Sequence:  siNA antisense region
cggcugcgggcuggguugg

SEQ ID NO: 520 - RNA, 19 nt, Artificial Sequence
  Description of Artificial Sequence:  siNA antisense region
auuauuauagccacgaggc

SEQ ID NO: 521 - RNA, 19 nt, Artificial Sequence
  Description of Artificial Sequence:  siNA antisense region
gaccccugagcauccugga

SEQ ID NO: 522 - RNA, 19 nt, Artificial Sequence
  Description of Artificial Sequence:  siNA antisense region
gaccgcuucucccacugug

SEQ ID NO: 523 - RNA, 19 nt, Artificial Sequence
  Description of Artificial Sequence:  siNA antisense region
gcugguuccuggccucggg

SEQ ID NO: 524 - RNA, 19 nt, Artificial Sequence
  Description of Artificial Sequence:  siNA antisense region
uuccagugugggcacuugg

SEQ ID NO: 525 - RNA, 19 nt, Artificial Sequence
  Description of Artificial Sequence:  siNA antisense region
agcuugguaagacaauucu

SEQ ID NO: 526 - RNA, 19 nt, Artificial Sequence
  Description of Artificial Sequence:  siNA antisense region
uccagaaaacagggcaaga

SEQ ID NO: 527 - RNA, 19 nt, Artificial Sequence
  Description of Artificial Sequence:  siNA antisense region
ucccuuuucauguugugcu

SEQ ID NO: 528 - RNA, 19 nt, Artificial Sequence
  Description of Artificial Sequence:  siNA antisense region
gccuugugaggaucuucau

SEQ ID NO: 529 - RNA, 19 nt, Artificial Sequence
  Description of Artificial Sequence:  siNA antisense region
aaaggcaucucuuuggcag

SEQ ID NO: 530 - RNA, 19 nt, Artificial Sequence
  Description of Artificial Sequence:  siNA antisense region
gauuuuccagagcccugga

SEQ ID NO: 531 - RNA, 19 nt, Artificial Sequence
  Description of Artificial Sequence:  siNA antisense region
uccacugggcaccaugcug

SEQ ID NO: 532 - RNA, 19 nt, Artificial Sequence
  Description of Artificial Sequence:  siNA antisense region
aggacugucuugcugaucu

SEQ ID NO: 533 - RNA, 19 nt, Artificial Sequence
  Description of Artificial Sequence:  siNA antisense region
cugaugcucucuggccaga

SEQ ID NO: 534 - RNA, 19 nt, Artificial Sequence
  Description of Artificial Sequence:  siNA antisense region
uccacacaucgcaccacgc

SEQ ID NO: 535 - RNA, 19 nt, Artificial Sequence
  Description of Artificial Sequence:  siNA antisense region
accggggccucaaacaacu

SEQ ID NO: 536 - RNA, 19 nt, Artificial Sequence
  Description of Artificial Sequence:  siNA antisense region
uccuccuccucacacucca

SEQ ID NO: 537 - RNA, 19 nt, Artificial Sequence
  Description of Artificial Sequence:  siNA antisense region
uuuucuuccucuaccuccu

SEQ ID NO: 538 - RNA, 19 nt, Artificial Sequence
  Description of Artificial Sequence:  siNA antisense region
gaugcacagaagcucccuu

SEQ ID NO: 539 - RNA, 19 nt, Artificial Sequence
  Description of Artificial Sequence:  siNA antisense region
ucccugcugcucucaggcg

SEQ ID NO: 540 - RNA, 19 nt, Artificial Sequence
  Description of Artificial Sequence:  siNA antisense region
cuucccuccuggaagucau

SEQ ID NO: 541 - RNA, 19 nt, Artificial Sequence
  Description of Artificial Sequence:  siNA antisense region
cgggccacaaugcccuccc

SEQ ID NO: 542 - RNA, 19 nt, Artificial Sequence
  Description of Artificial Sequence:  siNA antisense region
aacaggcucucuguuagcc

SEQ ID NO: 543 - RNA, 19 nt, Artificial Sequence
  Description of Artificial Sequence:  siNA antisense region
ucuccgagcagguccagga

SEQ ID NO: 544 - RNA, 19 nt, Artificial Sequence
  Description of Artificial Sequence:  siNA antisense region
caaaagcccccauucuccu

SEQ ID NO: 545 - RNA, 19 nt, Artificial Sequence
  Description of Artificial Sequence:  siNA antisense region
ucccccauguccugcuggc

SEQ ID NO: 546 - RNA, 19 nt, Artificial Sequence
  Description of Artificial Sequence:  siNA antisense region
gguggaagaaggcaugacu

SEQ ID NO: 547 - RNA, 19 nt, Artificial Sequence
  Description of Artificial Sequence:  siNA antisense region
gcacucguacuucccgaag

SEQ ID NO: 548 - RNA, 19 nt, Artificial Sequence
  Description of Artificial Sequence:  siNA antisense region
ucaucccagggcaugugag

SEQ ID NO: 549 - RNA, 19 nt, Artificial Sequence
  Description of Artificial Sequence:  siNA antisense region
ggcccugcacuugggaacu

SEQ ID NO: 550 - RNA, 19 nt, Artificial Sequence
  Description of Artificial Sequence:  siNA antisense region
cagggaggugccuccuugg

SEQ ID NO: 551 - RNA, 19 nt, Artificial Sequence
  Description of Artificial Sequence:  siNA antisense region
agaggcugcuccuugcccc

SEQ ID NO: 552 - RNA, 19 nt, Artificial Sequence
  Description of Artificial Sequence:  siNA antisense region
ggacuuggcuccaggugga

SEQ ID NO: 553 - RNA, 19 nt, Artificial Sequence
  Description of Artificial Sequence:  siNA antisense region
ugggucgggcuggcaggag

SEQ ID NO: 554 - RNA, 19 nt, Artificial Sequence
  Description of Artificial Sequence:  siNA antisense region
gucagguugucuggacucu

SEQ ID NO: 555 - RNA, 19 nt, Artificial Sequence
  Description of Artificial Sequence:  siNA antisense region
aggggcgucucugugcaag

SEQ ID NO: 556 - RNA, 19 nt, Artificial Sequence
  Description of Artificial Sequence:  siNA antisense region
ggguugccugcgaugacga

SEQ ID NO: 557 - RNA, 19 nt, Artificial Sequence
  Description of Artificial Sequence:  siNA antisense region
cugaagcugcgguaagcag

SEQ ID NO: 558 - RNA, 19 nt, Artificial Sequence
  Description of Artificial Sequence:  siNA antisense region
gacuggcucagggaguugc

SEQ ID NO: 559 - RNA, 19 nt, Artificial Sequence
  Description of Artificial Sequence:  siNA antisense region
agcucucugggacacggug

SEQ ID NO: 560 - RNA, 19 nt, Artificial Sequence
  Description of Artificial Sequence:  siNA antisense region
agcagugggucuggaccca

SEQ ID NO: 561 - RNA, 19 nt, Artificial Sequence
  Description of Artificial Sequence:  siNA antisense region
uccuccaggugucuggcca

SEQ ID NO: 562 - RNA, 19 nt, Artificial Sequence
  Description of Artificial Sequence:  siNA antisense region
ggcaucucggguucuacuu

SEQ ID NO: 563 - RNA, 19 nt, Artificial Sequence
  Description of Artificial Sequence:  siNA antisense region
gagagcugggggacacagg

SEQ ID NO: 564 - RNA, 19 nt, Artificial Sequence
  Description of Artificial Sequence:  siNA antisense region
ggcacagugguuggcucag

SEQ ID NO: 565 - RNA, 19 nt, Artificial Sequence
  Description of Artificial Sequence:  siNA antisense region
guuucuggcucagguuggg

SEQ ID NO: 566 - RNA, 19 nt, Artificial Sequence
  Description of Artificial Sequence:  siNA antisense region
cggaggaucugcucccagg

SEQ ID NO: 567 - RNA, 19 nt, Artificial Sequence
  Description of Artificial Sequence:  siNA antisense region
ugcuggaggacauuucggc

SEQ ID NO: 568 - RNA, 19 nt, Artificial Sequence
  Description of Artificial Sequence:  siNA antisense region
ggggcugcagcugccccau

SEQ ID NO: 569 - RNA, 19 nt, Artificial Sequence
  Description of Artificial Sequence:  siNA antisense region
cuggugggggccgagacgg

SEQ ID NO: 570 - RNA, 19 nt, Artificial Sequence
  Description of Artificial Sequence:  siNA antisense region
acaaacuccugauagccac

SEQ ID NO: 571 - RNA, 19 nt, Artificial Sequence
  Description of Artificial Sequence:  siNA antisense region
cccugcuccaccgcaugua

SEQ ID NO: 572 - RNA, 19 nt, Artificial Sequence
  Description of Artificial Sequence:  siNA antisense region
gcacuggccugggugccac

SEQ ID NO: 573 - RNA, 19 nt, Artificial Sequence
  Description of Artificial Sequence:  siNA antisense region
ggacccaagcccaccaccg

SEQ ID NO: 574 - RNA, 19 nt, Artificial Sequence
  Description of Artificial Sequence:  siNA antisense region
uaaccagccucuccugggg

SEQ ID NO: 575 - RNA, 19 nt, Artificial Sequence
  Description of Artificial Sequence:  siNA antisense region
aggcuugagaaggccuugu

SEQ ID NO: 576 - RNA, 19 nt, Artificial Sequence
  Description of Artificial Sequence:  siNA antisense region
acagcacugcuggcaagca

SEQ ID NO: 577 - RNA, 19 nt, Artificial Sequence
  Description of Artificial Sequence:  siNA antisense region
ccacauuucucuggggaca

SEQ ID NO: 578 - RNA, 19 nt, Artificial Sequence
  Description of Artificial Sequence:  siNA antisense region
ccacugcuagccccaaacc

SEQ ID NO: 579 - RNA, 19 nt, Artificial Sequence
  Description of Artificial Sequence:  siNA antisense region
ggcuuauaccccucuuccc

SEQ ID NO: 580 - RNA, 19 nt, Artificial Sequence
  Description of Artificial Sequence:  siNA antisense region
ggaaugaggucuuggaaag

SEQ ID NO: 581 - RNA, 19 nt, Artificial Sequence
  Description of Artificial Sequence:  siNA antisense region
ggguccccagggcagccag

SEQ ID NO: 582 - RNA, 19 nt, Artificial Sequence
  Description of Artificial Sequence:  siNA antisense region
gggacagggacuggggcag

SEQ ID NO: 583 - RNA, 19 nt, Artificial Sequence
  Description of Artificial Sequence:  siNA antisense region
aguccaaaggugaacaagg

SEQ ID NO: 584 - RNA, 19 nt, Artificial Sequence
  Description of Artificial Sequence:  siNA antisense region
cgagguggcucccugucca

SEQ ID NO: 585 - RNA, 19 nt, Artificial Sequence
  Description of Artificial Sequence:  siNA antisense region
ugugagcucugcggacugc

SEQ ID NO: 586 - RNA, 19 nt, Artificial Sequence
  Description of Artificial Sequence:  siNA antisense region
ggggagcugcuugggagau

SEQ ID NO: 587 - RNA, 19 nt, Artificial Sequence
  Description of Artificial Sequence:  siNA antisense region
uccagacccaggugcucug

SEQ ID NO: 588 - RNA, 19 nt, Artificial Sequence
  Description of Artificial Sequence:  siNA antisense region
ucuaccuuuucccccggcu

SEQ ID NO: 589 - RNA, 19 nt, Artificial Sequence
  Description of Artificial Sequence:  siNA antisense region
gggggcuuuggcauguccu

SEQ ID NO: 590 - RNA, 19 nt, Artificial Sequence
  Description of Artificial Sequence:  siNA antisense region
gccugcuccuggggaagug

SEQ ID NO: 591 - RNA, 19 nt, Artificial Sequence
  Description of Artificial Sequence:  siNA antisense region
uccacaagggggucugugg

SEQ ID NO: 592 - RNA, 19 nt, Artificial Sequence
  Description of Artificial Sequence:  siNA antisense region
augccacugcccaggcugu

SEQ ID NO: 593 - RNA, 19 nt, Artificial Sequence
  Description of Artificial Sequence:  siNA antisense region
guaagggcugaguagacaa

SEQ ID NO: 594 - RNA, 19 nt, Artificial Sequence
  Description of Artificial Sequence:  siNA antisense region
uggccgcacagguggcagg

SEQ ID NO: 595 - RNA, 19 nt, Artificial Sequence
  Description of Artificial Sequence:  siNA antisense region
ccaugacacuguuucaggu

SEQ ID NO: 596 - RNA, 19 nt, Artificial Sequence
  Description of Artificial Sequence:  siNA antisense region
uggccaccauccuccuggc

SEQ ID NO: 597 - RNA, 19 nt, Artificial Sequence
  Description of Artificial Sequence:  siNA antisense region
cuggccaugacaggggucu

SEQ ID NO: 598 - RNA, 19 nt, Artificial Sequence
  Description of Artificial Sequence:  siNA antisense region
cagcagccacagcaaggac

SEQ ID NO: 599 - RNA, 19 nt, Artificial Sequence
  Description of Artificial Sequence:  siNA antisense region
gaggaccugucuccacagc

SEQ ID NO: 600 - RNA, 19 nt, Artificial Sequence
  Description of Artificial Sequence:  siNA antisense region
agggggguuguagggggcg

SEQ ID NO: 601 - RNA, 19 nt, Artificial Sequence
  Description of Artificial Sequence:  siNA antisense region
gaggggucuggggcccuca

SEQ ID NO: 602 - RNA, 19 nt, Artificial Sequence
  Description of Artificial Sequence:  siNA antisense region
aguggaaccccaccuggag

SEQ ID NO: 603 - RNA, 19 nt, Artificial Sequence
  Description of Artificial Sequence:  siNA antisense region
ggacacagacuggccucca

SEQ ID NO: 604 - RNA, 19 nt, Artificial Sequence
  Description of Artificial Sequence:  siNA antisense region
gagggugccagggaggccg

SEQ ID NO: 605 - RNA, 19 nt, Artificial Sequence
  Description of Artificial Sequence:  siNA antisense region
cucuucucugagaugcccg

SEQ ID NO: 606 - RNA, 19 nt, Artificial Sequence
  Description of Artificial Sequence:  siNA antisense region
aaggaugaugaggauuuac

SEQ ID NO: 607 - RNA, 19 nt, Artificial Sequence
  Description of Artificial Sequence:  siNA antisense region
uugccaggggcaggaugga

SEQ ID NO: 608 - RNA, 19 nt, Artificial Sequence
  Description of Artificial Sequence:  siNA antisense region
uggcuugagcucugagcau

SEQ ID NO: 609 - RNA, 19 nt, Artificial Sequence
  Description of Artificial Sequence:  siNA antisense region
uucacgauuuugggggucu

SEQ ID NO: 610 - RNA, 19 nt, Artificial Sequence
  Description of Artificial Sequence:  siNA antisense region
ggucccacggagacaaagu

SEQ ID NO: 611 - RNA, 19 nt, Artificial Sequence
  Description of Artificial Sequence:  siNA antisense region
gagacccucauguaugugg

SEQ ID NO: 612 - RNA, 19 nt, Artificial Sequence
  Description of Artificial Sequence:  siNA antisense region
aagaggacaugcaccuaag

SEQ ID NO: 613 - RNA, 19 nt, Artificial Sequence
  Description of Artificial Sequence:  siNA antisense region
aucugcagacucagcaaca

SEQ ID NO: 614 - RNA, 19 nt, Artificial Sequence
  Description of Artificial Sequence:  siNA antisense region
ggauaagcccuaguccuca

SEQ ID NO: 615 - RNA, 19 nt, Artificial Sequence
  Description of Artificial Sequence:  siNA antisense region
guggcauuucccaggcaug

SEQ ID NO: 616 - RNA, 19 nt, Artificial Sequence
  Description of Artificial Sequence:  siNA antisense region
cuggcugccuuccaggagg

SEQ ID NO: 617 - RNA, 19 nt, Artificial Sequence
  Description of Artificial Sequence:  siNA antisense region
uuuuggaaaucugccagcc

SEQ ID NO: 618 - RNA, 19 nt, Artificial Sequence
  Description of Artificial Sequence:  siNA antisense region
accaugguucuucaagucu

SEQ ID NO: 619 - RNA, 19 nt, Artificial Sequence
  Description of Artificial Sequence:  siNA antisense region
ggggccaaucaccuucaua

SEQ ID NO: 620 - RNA, 19 nt, Artificial Sequence
  Description of Artificial Sequence:  siNA antisense region
uguuaggccaacgucagug

SEQ ID NO: 621 - RNA, 19 nt, Artificial Sequence
  Description of Artificial Sequence:  siNA antisense region
ccagucucugcagcccagu

SEQ ID NO: 622 - RNA, 19 nt, Artificial Sequence
  Description of Artificial Sequence:  siNA antisense region
cccaaugcugggcgggguc

SEQ ID NO: 623 - RNA, 19 nt, Artificial Sequence
  Description of Artificial Sequence:  siNA antisense region
gggauguggcgagcccagc

SEQ ID NO: 624 - RNA, 19 nt, Artificial Sequence
  Description of Artificial Sequence:  siNA antisense region
agugcccucuacucucaug

SEQ ID NO: 625 - RNA, 19 nt, Artificial Sequence
  Description of Artificial Sequence:  siNA antisense region
cguggggcacggcgaccca

SEQ ID NO: 626 - RNA, 19 nt, Artificial Sequence
  Description of Artificial Sequence:  siNA antisense region
uuuccugcaggggccugcc

SEQ ID NO: 627 - RNA, 19 nt, Artificial Sequence
  Description of Artificial Sequence:  siNA antisense region
gugcccaagggccucaguu

SEQ ID NO: 628 - RNA, 19 nt, Artificial Sequence
  Description of Artificial Sequence:  siNA antisense region
acucguucacaagucgagg

SEQ ID NO: 629 - RNA, 19 nt, Artificial Sequence
  Description of Artificial Sequence:  siNA antisense region
uggagggagcagccaacaa

SEQ ID NO: 630 - RNA, 19 nt, Artificial Sequence
  Description of Artificial Sequence:  siNA antisense region
agucugcugcagaagcugu

SEQ ID NO: 631 - RNA, 19 nt, Artificial Sequence
  Description of Artificial Sequence:  siNA antisense region
ggcaguuacaacagggaca

SEQ ID NO: 632 - RNA, 19 nt, Artificial Sequence
  Description of Artificial Sequence:  siNA antisense region
ugggcaaaacaugccuugg

SEQ ID NO: 633 - RNA, 19 nt, Artificial Sequence
  Description of Artificial Sequence:  siNA antisense region
acgugggccaugaucuggu

SEQ ID NO: 634 - RNA, 19 nt, Artificial Sequence
  Description of Artificial Sequence:  siNA antisense region
agaggcaggugggccucca

SEQ ID NO: 635 - RNA, 19 nt, Artificial Sequence
  Description of Artificial Sequence:  siNA antisense region
cuucuaguucagugagaca

SEQ ID NO: 636 - RNA, 19 nt, Artificial Sequence
  Description of Artificial Sequence:  siNA antisense region
guuaguuucuaggcucggc

SEQ ID NO: 637 - RNA, 19 nt, Artificial Sequence
  Description of Artificial Sequence:  siNA antisense region
cauucccuugauggcugug

SEQ ID NO: 638 - RNA, 19 nt, Artificial Sequence
  Description of Artificial Sequence:  siNA antisense region
ucccaaggccgcccaaguc

SEQ ID NO: 639 - RNA, 19 nt, Artificial Sequence
  Description of Artificial Sequence:  siNA antisense region
uucaauuucucaucgauuu

SEQ ID NO: 640 - RNA, 19 nt, Artificial Sequence
  Description of Artificial Sequence:  siNA antisense region
ugaccacccucccugaagu

SEQ ID NO: 641 - RNA, 19 nt, Artificial Sequence
  Description of Artificial Sequence:  siNA antisense region
augagcaccucuaggcaau

SEQ ID NO: 642 - RNA, 19 nt, Artificial Sequence
  Description of Artificial Sequence:  siNA antisense region
ggaagcucuguuaaaugaa

SEQ ID NO: 643 - RNA, 19 nt, Artificial Sequence
  Description of Artificial Sequence:  siNA antisense region
ccuccagcaucaaccuaag

SEQ ID NO: 644 - RNA, 19 nt, Artificial Sequence
  Description of Artificial Sequence:  siNA antisense region
uugacagccgggauucugc

SEQ ID NO: 645 - RNA, 19 nt, Artificial Sequence
  Description of Artificial Sequence:  siNA antisense region
cccuuaacugaacaccccu

SEQ ID NO: 646 - RNA, 19 nt, Artificial Sequence
  Description of Artificial Sequence:  siNA antisense region
ucauguccucuguugcucc

SEQ ID NO: 647 - RNA, 19 nt, Artificial Sequence
  Description of Artificial Sequence:  siNA antisense region
uuuagucauagcaauuuuu

SEQ ID NO: 648 - RNA, 19 nt, Artificial Sequence
  Description of Artificial Sequence:  siNA antisense region
gcagcaaauugucccugcu

SEQ ID NO: 649 - RNA, 19 nt, Artificial Sequence
  Description of Artificial Sequence:  siNA antisense region
gcugggcauggguguuugg

SEQ ID NO: 650 - RNA, 19 nt, Artificial Sequence
  Description of Artificial Sequence:  siNA antisense region
ggagcccccagccauacag

SEQ ID NO: 651 - RNA, 19 nt, Artificial Sequence
  Description of Artificial Sequence:  siNA antisense region
gggguuccaugcauacgag

SEQ ID NO: 652 - RNA, 19 nt, Artificial Sequence
  Description of Artificial Sequence:  siNA antisense region
cugagcauauuuauucugg

SEQ ID NO: 653 - RNA, 19 nt, Artificial Sequence
  Description of Artificial Sequence:  siNA antisense region
gcccggcccacaggguggc

SEQ ID NO: 654 - RNA, 19 nt, Artificial Sequence
  Description of Artificial Sequence:  siNA antisense region
augccugcugucuggauug

SEQ ID NO: 655 - RNA, 19 nt, Artificial Sequence
  Description of Artificial Sequence:  siNA antisense region
caggguaacuggugccuua

SEQ ID NO: 656 - RNA, 19 nt, Artificial Sequence
  Description of Artificial Sequence:  siNA antisense region
gaggucugggccaacaugc

SEQ ID NO: 657 - RNA, 19 nt, Artificial Sequence
  Description of Artificial Sequence:  siNA antisense region
ccgccuucccuagcaccug

SEQ ID NO: 658 - RNA, 19 nt, Artificial Sequence
  Description of Artificial Sequence:  siNA antisense region
uuacucaacccaagguucc

SEQ ID NO: 659 - RNA, 19 nt, Artificial Sequence
  Description of Artificial Sequence:  siNA antisense region
aaaacacacagacgagcau

SEQ ID NO: 660 - RNA, 19 nt, Artificial Sequence
  Description of Artificial Sequence:  siNA antisense region
auaacaggugaugaaacua

SEQ ID NO: 661 - RNA, 19 nt, Artificial Sequence
  Description of Artificial Sequence:  siNA antisense region
ucuccucagcaaacacaga

SEQ ID NO: 662 - RNA, 19 nt, Artificial Sequence
  Description of Artificial Sequence:  siNA antisense region
ccaccccuucuguuccacu

SEQ ID NO: 663 - RNA, 19 nt, Artificial Sequence
  Description of Artificial Sequence:  siNA antisense region
cuuuauuuauacaaaacuc

SEQ ID NO: 664 - RNA, 19 nt, Artificial Sequence
  Description of Artificial Sequence:  siNA antisense region
gacaaagaaacuuuauuua

SEQ ID NO: 665 - RNA, 19 nt, Artificial Sequence
  Description of Artificial Sequence:  Target Sequence/siNA sense region
gccacccagccuaugcauc

SEQ ID NO: 666 - RNA, 19 nt, Artificial Sequence
  Description of Artificial Sequence:  Target Sequence/siNA sense region
ccgcuccucaauccucucc

SEQ ID NO: 667 - RNA, 19 nt, Artificial Sequence
  Description of Artificial Sequence:  Target Sequence/siNA sense region
cuguuggcacugggccuca

SEQ ID NO: 668 - RNA, 19 nt, Artificial Sequence
  Description of Artificial Sequence:  Target Sequence/siNA sense region
auggcgcuuuuguugacca

SEQ ID NO: 669 - RNA, 19 nt, Artificial Sequence
  Description of Artificial Sequence:  Target Sequence/siNA sense region
acggucauugcucucacuu

SEQ ID NO: 670 - RNA, 19 nt, Artificial Sequence
  Description of Artificial Sequence:  Target Sequence/siNA sense region
ugccuuggcggcuuugccu

SEQ ID NO: 671 - RNA, 19 nt, Artificial Sequence
  Description of Artificial Sequence:  Target Sequence/siNA sense region
uccccaggcccugugccuc

SEQ ID NO: 672 - RNA, 19 nt, Artificial Sequence
  Description of Artificial Sequence:  Target Sequence/siNA sense region
cccucuacagcccucaggg

SEQ ID NO: 673 - RNA, 19 nt, Artificial Sequence
  Description of Artificial Sequence:  Target Sequence/siNA sense region
gagcucauugaggagcugg

SEQ ID NO: 674 - RNA, 19 nt, Artificial Sequence
  Description of Artificial Sequence:  Target Sequence/siNA sense region
gucaacaucacccagaacc

SEQ ID NO: 675 - RNA, 19 nt, Artificial Sequence
  Description of Artificial Sequence:  Target Sequence/siNA sense region
cagaaggcuccgcucugca

SEQ ID NO: 676 - RNA, 19 nt, Artificial Sequence
  Description of Artificial Sequence:  Target Sequence/siNA sense region
aauggcagcaugguaugga

SEQ ID NO: 677 - RNA, 19 nt, Artificial Sequence
  Description of Artificial Sequence:  Target Sequence/siNA sense region
agcaucaaccugacagcug

SEQ ID NO: 678 - RNA, 19 nt, Artificial Sequence
  Description of Artificial Sequence:  Target Sequence/siNA sense region
ggcauguacugugcagccc

SEQ ID NO: 679 - RNA, 19 nt, Artificial Sequence
  Description of Artificial Sequence:  Target Sequence/siNA sense region
cuggaaucccugaucaacg

SEQ ID NO: 680 - RNA, 19 nt, Artificial Sequence
  Description of Artificial Sequence:  Target Sequence/siNA sense region
gugucaggcugcagugcca

SEQ ID NO: 681 - RNA, 19 nt, Artificial Sequence
  Description of Artificial Sequence:  Target Sequence/siNA sense region
aucgagaagacccagagga

SEQ ID NO: 682 - RNA, 19 nt, Artificial Sequence
  Description of Artificial Sequence:  Target Sequence/siNA sense region
augcugagcggauucugcc

SEQ ID NO: 683 - RNA, 19 nt, Artificial Sequence
  Description of Artificial Sequence:  Target Sequence/siNA sense region
ccgcacaaggucucagcug

SEQ ID NO: 684 - RNA, 19 nt, Artificial Sequence
  Description of Artificial Sequence:  Target Sequence/siNA sense region
gggcaguuuuccagcuugc

SEQ ID NO: 685 - RNA, 19 nt, Artificial Sequence
  Description of Artificial Sequence:  Target Sequence/siNA sense region
cauguccgagacaccaaaa

SEQ ID NO: 686 - RNA, 19 nt, Artificial Sequence
  Description of Artificial Sequence:  Target Sequence/siNA sense region
aucgagguggcccaguuug

SEQ ID NO: 687 - RNA, 19 nt, Artificial Sequence
  Description of Artificial Sequence:  Target Sequence/siNA sense region
guaaaggaccugcucuuac

SEQ ID NO: 688 - RNA, 19 nt, Artificial Sequence
  Description of Artificial Sequence:  Target Sequence/siNA sense region
cauuuaaagaaacuuuuuc

SEQ ID NO: 689 - RNA, 19 nt, Artificial Sequence
  Description of Artificial Sequence:  Target Sequence/siNA sense region
cgcgagggacaguucaacu

SEQ ID NO: 690 - RNA, 19 nt, Artificial Sequence
  Description of Artificial Sequence:  Target Sequence/siNA sense region
ugaaacuucgaaagcauca

SEQ ID NO: 691 - RNA, 19 nt, Artificial Sequence
  Description of Artificial Sequence:  Target Sequence/siNA sense region
auuauuugcagagacagga

SEQ ID NO: 692 - RNA, 19 nt, Artificial Sequence
  Description of Artificial Sequence:  Target Sequence/siNA sense region
accugacuauugaaguugc

SEQ ID NO: 693 - RNA, 19 nt, Artificial Sequence
  Description of Artificial Sequence:  Target Sequence/siNA sense region
cagauucauuuuucuuucu

SEQ ID NO: 694 - RNA, 19 nt, Artificial Sequence
  Description of Artificial Sequence:  Target Sequence/siNA sense region
ugaugucaaaaaugucuug

SEQ ID NO: 695 - RNA, 19 nt, Artificial Sequence
  Description of Artificial Sequence:  Target Sequence/siNA sense region
ggguaggcgggaaggaggg

SEQ ID NO: 696 - RNA, 19 nt, Artificial Sequence
  Description of Artificial Sequence:  Target Sequence/siNA sense region
guuagggagggguaaaauu

SEQ ID NO: 697 - RNA, 19 nt, Artificial Sequence
  Description of Artificial Sequence:  Target Sequence/siNA sense region
uccuuagcuuagaccucag

SEQ ID NO: 698 - RNA, 19 nt, Artificial Sequence
  Description of Artificial Sequence:  Target Sequence/siNA sense region
gccugugcugcccgucuuc

SEQ ID NO: 699 - RNA, 19 nt, Artificial Sequence
  Description of Artificial Sequence:  Target Sequence/siNA sense region
cagccuagccgaccucagc

SEQ ID NO: 700 - RNA, 19 nt, Artificial Sequence
  Description of Artificial Sequence:  Target Sequence/siNA sense region
ccuuccccuugcccagggc

SEQ ID NO: 701 - RNA, 19 nt, Artificial Sequence
  Description of Artificial Sequence:  Target Sequence/siNA sense region
cucagccuggugggccucc

SEQ ID NO: 702 - RNA, 19 nt, Artificial Sequence
  Description of Artificial Sequence:  Target Sequence/siNA sense region
cucuguccagggcccugag

SEQ ID NO: 703 - RNA, 19 nt, Artificial Sequence
  Description of Artificial Sequence:  Target Sequence/siNA sense region
gcucgguggacccagggau

SEQ ID NO: 704 - RNA, 19 nt, Artificial Sequence
  Description of Artificial Sequence:  Target Sequence/siNA sense region
ugacaugucccuacacccc

SEQ ID NO: 705 - RNA, 19 nt, Artificial Sequence
  Description of Artificial Sequence:  Target Sequence/siNA sense region
cuccccugcccuagagcac

SEQ ID NO: 706 - RNA, 19 nt, Artificial Sequence
  Description of Artificial Sequence:  Target Sequence/siNA sense region
cacuguagcauuacagugg

SEQ ID NO: 707 - RNA, 19 nt, Artificial Sequence
  Description of Artificial Sequence:  Target Sequence/siNA sense region
ggugccccccuugccagac

SEQ ID NO: 708 - RNA, 19 nt, Artificial Sequence
  Description of Artificial Sequence:  Target Sequence/siNA sense region
cauguggugggacagggac

SEQ ID NO: 709 - RNA, 19 nt, Artificial Sequence
  Description of Artificial Sequence:  Target Sequence/siNA sense region
cccacuucacacacaggca

SEQ ID NO: 710 - RNA, 19 nt, Artificial Sequence
  Description of Artificial Sequence:  Target Sequence/siNA sense region
aacugaggcagacagcagc

SEQ ID NO: 711 - RNA, 19 nt, Artificial Sequence
  Description of Artificial Sequence:  Target Sequence/siNA sense region
cucaggcacacuucuucuu

SEQ ID NO: 712 - RNA, 19 nt, Artificial Sequence
  Description of Artificial Sequence:  Target Sequence/siNA sense region
uggucuuauuuauuauugu

SEQ ID NO: 713 - RNA, 19 nt, Artificial Sequence
  Description of Artificial Sequence:  Target Sequence/siNA sense region
uguguuauuuaaaugagug

SEQ ID NO: 714 - RNA, 19 nt, Artificial Sequence
  Description of Artificial Sequence:  Target Sequence/siNA sense region
guguuugucaccguugggg

SEQ ID NO: 715 - RNA, 19 nt, Artificial Sequence
  Description of Artificial Sequence:  Target Sequence/siNA sense region
gauuggggaagacuguggc

SEQ ID NO: 716 - RNA, 19 nt, Artificial Sequence
  Description of Artificial Sequence:  Target Sequence/siNA sense region
cugcuagcacuuggagcca

SEQ ID NO: 717 - RNA, 19 nt, Artificial Sequence
  Description of Artificial Sequence:  Target Sequence/siNA sense region
aaggguucagagacucagg

SEQ ID NO: 718 - RNA, 19 nt, Artificial Sequence
  Description of Artificial Sequence:  Target Sequence/siNA sense region
ggccccagcacuaaagcag

SEQ ID NO: 719 - RNA, 19 nt, Artificial Sequence
  Description of Artificial Sequence:  Target Sequence/siNA sense region
guggacaccaggagucccu

SEQ ID NO: 720 - RNA, 19 nt, Artificial Sequence
  Description of Artificial Sequence:  Target Sequence/siNA sense region
ugguaauaaguacugugua

SEQ ID NO: 721 - RNA, 19 nt, Artificial Sequence
  Description of Artificial Sequence:  Target Sequence/siNA sense region
acagaauucugcuaccuca

SEQ ID NO: 722 - RNA, 19 nt, Artificial Sequence
  Description of Artificial Sequence:  Target Sequence/siNA sense region
acugggguccuggggccuc

SEQ ID NO: 723 - RNA, 19 nt, Artificial Sequence
  Description of Artificial Sequence:  Target Sequence/siNA sense region
cggagccucauccgaggca

SEQ ID NO: 724 - RNA, 19 nt, Artificial Sequence
  Description of Artificial Sequence:  Target Sequence/siNA sense region
agggucaggagaggggcag

SEQ ID NO: 725 - RNA, 19 nt, Artificial Sequence
  Description of Artificial Sequence:  Target Sequence/siNA sense region
gaacagccgcuccugucug

SEQ ID NO: 726 - RNA, 19 nt, Artificial Sequence
  Description of Artificial Sequence:  Target Sequence/siNA sense region
gccagccagcagccagcuc

SEQ ID NO: 727 - RNA, 19 nt, Artificial Sequence
  Description of Artificial Sequence:  Target Sequence/siNA sense region
cucagccaacgaguaauuu

SEQ ID NO: 728 - RNA, 19 nt, Artificial Sequence
  Description of Artificial Sequence:  Target Sequence/siNA sense region
uauuguuuuuccuuguauu

SEQ ID NO: 729 - RNA, 19 nt, Artificial Sequence
  Description of Artificial Sequence:  Target Sequence/siNA sense region
uuaaauauuaaauauguua

SEQ ID NO: 730 - RNA, 19 nt, Artificial Sequence
  Description of Artificial Sequence:  Target Sequence/siNA sense region
agcaaagaguuaauauaua

SEQ ID NO: 731 - RNA, 19 nt, Artificial Sequence
  Description of Artificial Sequence:  Target Sequence/siNA sense region
agaaggguaccuugaacac

SEQ ID NO: 732 - RNA, 19 nt, Artificial Sequence
  Description of Artificial Sequence:  Target Sequence/siNA sense region
cugggggaggggacauuga

SEQ ID NO: 733 - RNA, 19 nt, Artificial Sequence
  Description of Artificial Sequence:  Target Sequence/siNA sense region
aacaaguuguuucauugac

SEQ ID NO: 734 - RNA, 19 nt, Artificial Sequence
  Description of Artificial Sequence:  Target Sequence/siNA sense region
cuaucaaacugaagccaga

SEQ ID NO: 735 - RNA, 19 nt, Artificial Sequence
  Description of Artificial Sequence:  Target Sequence/siNA sense region
gaaauaaaguuggugacag

SEQ ID NO: 736 - RNA, 19 nt, Artificial Sequence
  Description of Artificial Sequence:  siNA antisense region
gaugcauaggcuggguggc

SEQ ID NO: 737 - RNA, 19 nt, Artificial Sequence
  Description of Artificial Sequence:  siNA antisense region
ggagaggauugaggagcgg

SEQ ID NO: 738 - RNA, 19 nt, Artificial Sequence
  Description of Artificial Sequence:  siNA antisense region
ugaggcccagugccaacag

SEQ ID NO: 739 - RNA, 19 nt, Artificial Sequence
  Description of Artificial Sequence:  siNA antisense region
uggucaacaaaagcgccau

SEQ ID NO: 740 - RNA, 19 nt, Artificial Sequence
  Description of Artificial Sequence:  siNA antisense region
aagugagagcaaugaccgu

SEQ ID NO: 741 - RNA, 19 nt, Artificial Sequence
  Description of Artificial Sequence:  siNA antisense region
aggcaaagccgccaaggca

SEQ ID NO: 742 - RNA, 19 nt, Artificial Sequence
  Description of Artificial Sequence:  siNA antisense region
gaggcacagggccugggga

SEQ ID NO: 743 - RNA, 19 nt, Artificial Sequence
  Description of Artificial Sequence:  siNA antisense region
cccugagggcuguagaggg

SEQ ID NO: 744 - RNA, 19 nt, Artificial Sequence
  Description of Artificial Sequence:  siNA antisense region
ccagcuccucaaugagcuc

SEQ ID NO: 745 - RNA, 19 nt, Artificial Sequence
  Description of Artificial Sequence:  siNA antisense region
gguucugggugauguugac

SEQ ID NO: 746 - RNA, 19 nt, Artificial Sequence
  Description of Artificial Sequence:  siNA antisense region
ugcagagcggagccuucug

SEQ ID NO: 747 - RNA, 19 nt, Artificial Sequence
  Description of Artificial Sequence:  siNA antisense region
uccauaccaugcugccauu

SEQ ID NO: 748 - RNA, 19 nt, Artificial Sequence
  Description of Artificial Sequence:  siNA antisense region
cagcugucagguugaugcu

SEQ ID NO: 749 - RNA, 19 nt, Artificial Sequence
  Description of Artificial Sequence:  siNA antisense region
gggcugcacaguacaugcc

SEQ ID NO: 750 - RNA, 19 nt, Artificial Sequence
  Description of Artificial Sequence:  siNA antisense region
cguugaucagggauuccag

SEQ ID NO: 751 - RNA, 19 nt, Artificial Sequence
  Description of Artificial Sequence:  siNA antisense region
uggcacugcagccugacac

SEQ ID NO: 752 - RNA, 19 nt, Artificial Sequence
  Description of Artificial Sequence:  siNA antisense region
uccucugggucuucucgau

SEQ ID NO: 753 - RNA, 19 nt, Artificial Sequence
  Description of Artificial Sequence:  siNA antisense region
ggcagaauccgcucagcau

SEQ ID NO: 754 - RNA, 19 nt, Artificial Sequence
  Description of Artificial Sequence:  siNA antisense region
cagcugagaccuugugcgg

SEQ ID NO: 755 - RNA, 19 nt, Artificial Sequence
  Description of Artificial Sequence:  siNA antisense region
gcaagcuggaaaacugccc

SEQ ID NO: 756 - RNA, 19 nt, Artificial Sequence
  Description of Artificial Sequence:  siNA antisense region
uuuuggugucucggacaug

SEQ ID NO: 757 - RNA, 19 nt, Artificial Sequence
  Description of Artificial Sequence:  siNA antisense region
caaacugggccaccucgau

SEQ ID NO: 758 - RNA, 19 nt, Artificial Sequence
  Description of Artificial Sequence:  siNA antisense region
guaagagcagguccuuuac

SEQ ID NO: 759 - RNA, 19 nt, Artificial Sequence
  Description of Artificial Sequence:  siNA antisense region
gaaaaaguuucuuuaaaug

SEQ ID NO: 760 - RNA, 19 nt, Artificial Sequence
  Description of Artificial Sequence:  siNA antisense region
aguugaacugucccucgcg

SEQ ID NO: 761 - RNA, 19 nt, Artificial Sequence
  Description of Artificial Sequence:  siNA antisense region
ugaugcuuucgaaguuuca

SEQ ID NO: 762 - RNA, 19 nt, Artificial Sequence
  Description of Artificial Sequence:  siNA antisense region
uccugucucugcaaauaau

SEQ ID NO: 763 - RNA, 19 nt, Artificial Sequence
  Description of Artificial Sequence:  siNA antisense region
gcaacuucaauagucaggu

SEQ ID NO: 764 - RNA, 19 nt, Artificial Sequence
  Description of Artificial Sequence:  siNA antisense region
agaaagaaaaaugaaucug

SEQ ID NO: 765 - RNA, 19 nt, Artificial Sequence
  Description of Artificial Sequence:  siNA antisense region
caagacauuuuugacauca

SEQ ID NO: 766 - RNA, 19 nt, Artificial Sequence
  Description of Artificial Sequence:  siNA antisense region
cccuccuucccgccuaccc

SEQ ID NO: 767 - RNA, 19 nt, Artificial Sequence
  Description of Artificial Sequence:  siNA antisense region
aauuuuaccccucccuaac

SEQ ID NO: 768 - RNA, 19 nt, Artificial Sequence
  Description of Artificial Sequence:  siNA antisense region
cugaggucuaagcuaagga

SEQ ID NO: 769 - RNA, 19 nt, Artificial Sequence
  Description of Artificial Sequence:  siNA antisense region
gaagacgggcagcacaggc

SEQ ID NO: 770 - RNA, 19 nt, Artificial Sequence
  Description of Artificial Sequence:  siNA antisense region
gcugaggucggcuaggcug

SEQ ID NO: 771 - RNA, 19 nt, Artificial Sequence
  Description of Artificial Sequence:  siNA antisense region
gcccugggcaaggggaagg

SEQ ID NO: 772 - RNA, 19 nt, Artificial Sequence
  Description of Artificial Sequence:  siNA antisense region
ggaggcccaccaggcugag

SEQ ID NO: 773 - RNA, 19 nt, Artificial Sequence
  Description of Artificial Sequence:  siNA antisense region
cucagggcccuggacagag

SEQ ID NO: 774 - RNA, 19 nt, Artificial Sequence
  Description of Artificial Sequence:  siNA antisense region
aucccuggguccaccgagc

SEQ ID NO: 775 - RNA, 19 nt, Artificial Sequence
  Description of Artificial Sequence:  siNA antisense region
gggguguagggacauguca

SEQ ID NO: 776 - RNA, 19 nt, Artificial Sequence
  Description of Artificial Sequence:  siNA antisense region
gugcucuagggcaggggag

SEQ ID NO: 777 - RNA, 19 nt, Artificial Sequence
  Description of Artificial Sequence:  siNA antisense region
ccacuguaaugcuacagug

SEQ ID NO: 778 - RNA, 19 nt, Artificial Sequence
  Description of Artificial Sequence:  siNA antisense region
gucuggcaaggggggcacc

SEQ ID NO: 779 - RNA, 19 nt, Artificial Sequence
  Description of Artificial Sequence:  siNA antisense region
gucccugucccaccacaug

SEQ ID NO: 780 - RNA, 19 nt, Artificial Sequence
  Description of Artificial Sequence:  siNA antisense region
ugccugugugugaaguggg

SEQ ID NO: 781 - RNA, 19 nt, Artificial Sequence
  Description of Artificial Sequence:  siNA antisense region
gcugcugucugccucaguu

SEQ ID NO: 782 - RNA, 19 nt, Artificial Sequence
  Description of Artificial Sequence:  siNA antisense region
aagaagaagugugccugag

SEQ ID NO: 783 - RNA, 19 nt, Artificial Sequence
  Description of Artificial Sequence:  siNA antisense region
acaauaauaaauaagacca

SEQ ID NO: 784 - RNA, 19 nt, Artificial Sequence
  Description of Artificial Sequence:  siNA antisense region
cacucauuuaaauaacaca

SEQ ID NO: 785 - RNA, 19 nt, Artificial Sequence
  Description of Artificial Sequence:  siNA antisense region
ccccaacggugacaaacac

SEQ ID NO: 786 - RNA, 19 nt, Artificial Sequence
  Description of Artificial Sequence:  siNA antisense region
gccacagucuuccccaauc

SEQ ID NO: 787 - RNA, 19 nt, Artificial Sequence
  Description of Artificial Sequence:  siNA antisense region
uggcuccaagugcuagcag

SEQ ID NO: 788 - RNA, 19 nt, Artificial Sequence
  Description of Artificial Sequence:  siNA antisense region
ccugagucucugaacccuu

SEQ ID NO: 789 - RNA, 19 nt, Artificial Sequence
  Description of Artificial Sequence:  siNA antisense region
cugcuuuagugcuggggcc

SEQ ID NO: 790 - RNA, 19 nt, Artificial Sequence
  Description of Artificial Sequence:  siNA antisense region
agggacuccugguguccac

SEQ ID NO: 791 - RNA, 19 nt, Artificial Sequence
  Description of Artificial Sequence:  siNA antisense region
uacacaguacuuauuacca

SEQ ID NO: 792 - RNA, 19 nt, Artificial Sequence
  Description of Artificial Sequence:  siNA antisense region
ugagguagcagaauucugu

SEQ ID NO: 793 - RNA, 19 nt, Artificial Sequence
  Description of Artificial Sequence:  siNA antisense region
gaggccccaggaccccagu

SEQ ID NO: 794 - RNA, 19 nt, Artificial Sequence
  Description of Artificial Sequence:  siNA antisense region
ugccucggaugaggcuccg

SEQ ID NO: 795 - RNA, 19 nt, Artificial Sequence
  Description of Artificial Sequence:  siNA antisense region
cugccccucuccugacccu

SEQ ID NO: 796 - RNA, 19 nt, Artificial Sequence
  Description of Artificial Sequence:  siNA antisense region
cagacaggagcggcuguuc

SEQ ID NO: 797 - RNA, 19 nt, Artificial Sequence
  Description of Artificial Sequence:  siNA antisense region
gagcuggcugcuggcuggc

SEQ ID NO: 798 - RNA, 19 nt, Artificial Sequence
  Description of Artificial Sequence:  siNA antisense region
aaauuacucguuggcugag

SEQ ID NO: 799 - RNA, 19 nt, Artificial Sequence
  Description of Artificial Sequence:  siNA antisense region
aauacaaggaaaaacaaua

SEQ ID NO: 800 - RNA, 19 nt, Artificial Sequence
  Description of Artificial Sequence:  siNA antisense region
uaacauauuuaauauuuaa

SEQ ID NO: 801 - RNA, 19 nt, Artificial Sequence
  Description of Artificial Sequence:  siNA antisense region
uauauauuaacucuuugcu

SEQ ID NO: 802 - RNA, 19 nt, Artificial Sequence
  Description of Artificial Sequence:  siNA antisense region
guguucaagguacccuucu

SEQ ID NO: 803 - RNA, 19 nt, Artificial Sequence
  Description of Artificial Sequence:  siNA antisense region
ucaauguccccucccccag

SEQ ID NO: 804 - RNA, 19 nt, Artificial Sequence
  Description of Artificial Sequence:  siNA antisense region
gucaaugaaacaacuuguu

SEQ ID NO: 805 - RNA, 19 nt, Artificial Sequence
  Description of Artificial Sequence:  siNA antisense region
ucuggcuucaguuugauag

SEQ ID NO: 806 - RNA, 19 nt, Artificial Sequence
  Description of Artificial Sequence:  siNA antisense region
cugucaccaacuuuauuuc

SEQ ID NO: 807 - RNA, 19 nt, Artificial Sequence
  Description of Artificial Sequence:  Target Sequence/siNA sense region
ccaaggcuccagcccggcc

SEQ ID NO: 808 - RNA, 19 nt, Artificial Sequence
  Description of Artificial Sequence:  Target Sequence/siNA sense region
cgggcuccgaggcgagagg

SEQ ID NO: 809 - RNA, 19 nt, Artificial Sequence
  Description of Artificial Sequence:  Target Sequence/siNA sense region
gcugcauggaguggccggc

SEQ ID NO: 810 - RNA, 19 nt, Artificial Sequence
  Description of Artificial Sequence:  Target Sequence/siNA sense region
cgcggcucugcgggcugug

SEQ ID NO: 811 - RNA, 19 nt, Artificial Sequence
  Description of Artificial Sequence:  Target Sequence/siNA sense region
gggcgcugcugcucugcgc

SEQ ID NO: 812 - RNA, 19 nt, Artificial Sequence
  Description of Artificial Sequence:  Target Sequence/siNA sense region
ccggcggcgggggcggggg

SEQ ID NO: 813 - RNA, 19 nt, Artificial Sequence
  Description of Artificial Sequence:  Target Sequence/siNA sense region
gcgggggcgccgcgccuac

SEQ ID NO: 814 - RNA, 19 nt, Artificial Sequence
  Description of Artificial Sequence:  Target Sequence/siNA sense region
cggaaacucagccaccugu

SEQ ID NO: 815 - RNA, 19 nt, Artificial Sequence
  Description of Artificial Sequence:  Target Sequence/siNA sense region
ugacaaauuugagugucuc

SEQ ID NO: 816 - RNA, 19 nt, Artificial Sequence
  Description of Artificial Sequence:  Target Sequence/siNA sense region
cuguugaaaaccucugcac

SEQ ID NO: 817 - RNA, 19 nt, Artificial Sequence
  Description of Artificial Sequence:  Target Sequence/siNA sense region
caguaauauggacauggaa

SEQ ID NO: 818 - RNA, 19 nt, Artificial Sequence
  Description of Artificial Sequence:  Target Sequence/siNA sense region
auccacccgagggagccag

SEQ ID NO: 819 - RNA, 19 nt, Artificial Sequence
  Description of Artificial Sequence:  Target Sequence/siNA sense region
gcucaaauuguagucuaug

SEQ ID NO: 820 - RNA, 19 nt, Artificial Sequence
  Description of Artificial Sequence:  Target Sequence/siNA sense region
gguauuuuagucauuuugg

SEQ ID NO: 821 - RNA, 19 nt, Artificial Sequence
  Description of Artificial Sequence:  Target Sequence/siNA sense region
gcgacaaacaagauaagaa

SEQ ID NO: 822 - RNA, 19 nt, Artificial Sequence
  Description of Artificial Sequence:  Target Sequence/siNA sense region
aaauagcuccggaaacucg

SEQ ID NO: 823 - RNA, 19 nt, Artificial Sequence
  Description of Artificial Sequence:  Target Sequence/siNA sense region
gucguucaauagaaguacc

SEQ ID NO: 824 - RNA, 19 nt, Artificial Sequence
  Description of Artificial Sequence:  Target Sequence/siNA sense region
cccugaaugagaggauuug

SEQ ID NO: 825 - RNA, 19 nt, Artificial Sequence
  Description of Artificial Sequence:  Target Sequence/siNA sense region
gucugcaagugggguccca

SEQ ID NO: 826 - RNA, 19 nt, Artificial Sequence
  Description of Artificial Sequence:  Target Sequence/siNA sense region
aguguagcaccaaugagag

SEQ ID NO: 827 - RNA, 19 nt, Artificial Sequence
  Description of Artificial Sequence:  Target Sequence/siNA sense region
gugagaagccuagcauuuu

SEQ ID NO: 828 - RNA, 19 nt, Artificial Sequence
  Description of Artificial Sequence:  Target Sequence/siNA sense region
ugguugaaaaaugcaucuc

SEQ ID NO: 829 - RNA, 19 nt, Artificial Sequence
  Description of Artificial Sequence:  Target Sequence/siNA sense region
cacccccagaaggugaucc

SEQ ID NO: 830 - RNA, 19 nt, Artificial Sequence
  Description of Artificial Sequence:  Target Sequence/siNA sense region
cugagucugcugugacuga

SEQ ID NO: 831 - RNA, 19 nt, Artificial Sequence
  Description of Artificial Sequence:  Target Sequence/siNA sense region
agcuucaaugcauuuggca

SEQ ID NO: 832 - RNA, 19 nt, Artificial Sequence
  Description of Artificial Sequence:  Target Sequence/siNA sense region
acaaccugagcuacaugaa

SEQ ID NO: 833 - RNA, 19 nt, Artificial Sequence
  Description of Artificial Sequence:  Target Sequence/siNA sense region
aguguucuuggcucccugg

SEQ ID NO: 834 - RNA, 19 nt, Artificial Sequence
  Description of Artificial Sequence:  Target Sequence/siNA sense region
gaaggaauaccagucccga

SEQ ID NO: 835 - RNA, 19 nt, Artificial Sequence
  Description of Artificial Sequence:  Target Sequence/siNA sense region
acacuaacuauacucucua

SEQ ID NO: 836 - RNA, 19 nt, Artificial Sequence
  Description of Artificial Sequence:  Target Sequence/siNA sense region
acuauuggcacagaagccu

SEQ ID NO: 837 - RNA, 19 nt, Artificial Sequence
  Description of Artificial Sequence:  Target Sequence/siNA sense region
uggaaaaaauucaucaaug

SEQ ID NO: 838 - RNA, 19 nt, Artificial Sequence
  Description of Artificial Sequence:  Target Sequence/siNA sense region
gugaaaacaucuuuagaga

SEQ ID NO: 839 - RNA, 19 nt, Artificial Sequence
  Description of Artificial Sequence:  Target Sequence/siNA sense region
aaggccaauacuuugguug

SEQ ID NO: 840 - RNA, 19 nt, Artificial Sequence
  Description of Artificial Sequence:  Target Sequence/siNA sense region
guuccuuugaucugaccaa

SEQ ID NO: 841 - RNA, 19 nt, Artificial Sequence
  Description of Artificial Sequence:  Target Sequence/siNA sense region
aagugaaggauuccaguuu

SEQ ID NO: 842 - RNA, 19 nt, Artificial Sequence
  Description of Artificial Sequence:  Target Sequence/siNA sense region
uugaacaacacagugucca

SEQ ID NO: 843 - RNA, 19 nt, Artificial Sequence
  Description of Artificial Sequence:  Target Sequence/siNA sense region
aaauaauggucaaggauaa

SEQ ID NO: 844 - RNA, 19 nt, Artificial Sequence
  Description of Artificial Sequence:  Target Sequence/siNA sense region
augcaggaaaaauuaaacc

SEQ ID NO: 845 - RNA, 19 nt, Artificial Sequence
  Description of Artificial Sequence:  Target Sequence/siNA sense region
cauccuucaauauagugcc

SEQ ID NO: 846 - RNA, 19 nt, Artificial Sequence
  Description of Artificial Sequence:  Target Sequence/siNA sense region
cuuuaacuucccgugugaa

SEQ ID NO: 847 - RNA, 19 nt, Artificial Sequence
  Description of Artificial Sequence:  Target Sequence/siNA sense region
aaccugauccuccacauau

SEQ ID NO: 848 - RNA, 19 nt, Artificial Sequence
  Description of Artificial Sequence:  Target Sequence/siNA sense region
uuaaaaaccucuccuucca

SEQ ID NO: 849 - RNA, 19 nt, Artificial Sequence
  Description of Artificial Sequence:  Target Sequence/siNA sense region
acaaugaugaccuauaugu

SEQ ID NO: 850 - RNA, 19 nt, Artificial Sequence
  Description of Artificial Sequence:  Target Sequence/siNA sense region
ugcaaugggagaauccaca

SEQ ID NO: 851 - RNA, 19 nt, Artificial Sequence
  Description of Artificial Sequence:  Target Sequence/siNA sense region
agaauuuuauuagcagaug

SEQ ID NO: 852 - RNA, 19 nt, Artificial Sequence
  Description of Artificial Sequence:  Target Sequence/siNA sense region
gccuauuuuaugaaguaga

SEQ ID NO: 853 - RNA, 19 nt, Artificial Sequence
  Description of Artificial Sequence:  Target Sequence/siNA sense region
aagucaauaacagccaaac

SEQ ID NO: 854 - RNA, 19 nt, Artificial Sequence
  Description of Artificial Sequence:  Target Sequence/siNA sense region
cugagacacauaauguuuu

SEQ ID NO: 855 - RNA, 19 nt, Artificial Sequence
  Description of Artificial Sequence:  Target Sequence/siNA sense region
ucuacguccaagaggcuaa

SEQ ID NO: 856 - RNA, 19 nt, Artificial Sequence
  Description of Artificial Sequence:  Target Sequence/siNA sense region
aaugugagaauccagaauu

SEQ ID NO: 857 - RNA, 19 nt, Artificial Sequence
  Description of Artificial Sequence:  Target Sequence/siNA sense region
uugagagaaauguggagaa

SEQ ID NO: 858 - RNA, 19 nt, Artificial Sequence
  Description of Artificial Sequence:  Target Sequence/siNA sense region
auacaucuuguuucauggu

SEQ ID NO: 859 - RNA, 19 nt, Artificial Sequence
  Description of Artificial Sequence:  Target Sequence/siNA sense region
ucccugguguucuuccuga

SEQ ID NO: 860 - RNA, 19 nt, Artificial Sequence
  Description of Artificial Sequence:  Target Sequence/siNA sense region
auacuuugaacacagucag

SEQ ID NO: 861 - RNA, 19 nt, Artificial Sequence
  Description of Artificial Sequence:  Target Sequence/siNA sense region
gaauaagagucaaaacaaa

SEQ ID NO: 862 - RNA, 19 nt, Artificial Sequence
  Description of Artificial Sequence:  Target Sequence/siNA sense region
auaaguuaugcuaugagga

SEQ ID NO: 863 - RNA, 19 nt, Artificial Sequence
  Description of Artificial Sequence:  Target Sequence/siNA sense region
augacaaacucuggaguaa

SEQ ID NO: 864 - RNA, 19 nt, Artificial Sequence
  Description of Artificial Sequence:  Target Sequence/siNA sense region
auuggagccaagaaaugag

SEQ ID NO: 865 - RNA, 19 nt, Artificial Sequence
  Description of Artificial Sequence:  Target Sequence/siNA sense region
guauagguaagaagcgcaa

SEQ ID NO: 866 - RNA, 19 nt, Artificial Sequence
  Description of Artificial Sequence:  Target Sequence/siNA sense region
auuccacacucuacauaac

SEQ ID NO: 867 - RNA, 19 nt, Artificial Sequence
  Description of Artificial Sequence:  Target Sequence/siNA sense region
ccauguuacucauuguucc

SEQ ID NO: 868 - RNA, 19 nt, Artificial Sequence
  Description of Artificial Sequence:  Target Sequence/siNA sense region
cagucaucgucgcaggugc

SEQ ID NO: 869 - RNA, 19 nt, Artificial Sequence
  Description of Artificial Sequence:  Target Sequence/siNA sense region
caaucauaguacuccugcu

SEQ ID NO: 870 - RNA, 19 nt, Artificial Sequence
  Description of Artificial Sequence:  Target Sequence/siNA sense region
uuuaccuaaaaaggcucaa

SEQ ID NO: 871 - RNA, 19 nt, Artificial Sequence
  Description of Artificial Sequence:  Target Sequence/siNA sense region
agauuauuauauucccucc

SEQ ID NO: 872 - RNA, 19 nt, Artificial Sequence
  Description of Artificial Sequence:  Target Sequence/siNA sense region
caauuccugauccuggcaa

SEQ ID NO: 873 - RNA, 19 nt, Artificial Sequence
  Description of Artificial Sequence:  Target Sequence/siNA sense region
agauuuuuaaagaaauguu

SEQ ID NO: 874 - RNA, 19 nt, Artificial Sequence
  Description of Artificial Sequence:  Target Sequence/siNA sense region
uuggagaccagaaugauga

SEQ ID NO: 875 - RNA, 19 nt, Artificial Sequence
  Description of Artificial Sequence:  Target Sequence/siNA sense region
auacucugcacuggaagaa

SEQ ID NO: 876 - RNA, 19 nt, Artificial Sequence
  Description of Artificial Sequence:  Target Sequence/siNA sense region
aguacgacaucuaugagaa

SEQ ID NO: 877 - RNA, 19 nt, Artificial Sequence
  Description of Artificial Sequence:  Target Sequence/siNA sense region
agcaaaccaaggaggaaac

SEQ ID NO: 878 - RNA, 19 nt, Artificial Sequence
  Description of Artificial Sequence:  Target Sequence/siNA sense region
ccgacucuguagugcugau

SEQ ID NO: 879 - RNA, 19 nt, Artificial Sequence
  Description of Artificial Sequence:  Target Sequence/siNA sense region
uagaaaaccugaagaaagc

SEQ ID NO: 880 - RNA, 19 nt, Artificial Sequence
  Description of Artificial Sequence:  Target Sequence/siNA sense region
ccucucagugauggagaua

SEQ ID NO: 881 - RNA, 19 nt, Artificial Sequence
  Description of Artificial Sequence:  Target Sequence/siNA sense region
aauuuauuuuuaccuucac

SEQ ID NO: 882 - RNA, 19 nt, Artificial Sequence
  Description of Artificial Sequence:  Target Sequence/siNA sense region
cugugaccuugagaagauu

SEQ ID NO: 883 - RNA, 19 nt, Artificial Sequence
  Description of Artificial Sequence:  Target Sequence/siNA sense region
ucuucccauucuccauuug

SEQ ID NO: 884 - RNA, 19 nt, Artificial Sequence
  Description of Artificial Sequence:  Target Sequence/siNA sense region
guuaucugggaacuuauua

SEQ ID NO: 885 - RNA, 19 nt, Artificial Sequence
  Description of Artificial Sequence:  Target Sequence/siNA sense region
aaauggaaacugaaacuac

SEQ ID NO: 886 - RNA, 19 nt, Artificial Sequence
  Description of Artificial Sequence:  Target Sequence/siNA sense region
cugcaccauuuaaaaacag

SEQ ID NO: 887 - RNA, 19 nt, Artificial Sequence
  Description of Artificial Sequence:  Target Sequence/siNA sense region
ggcagcucauaagagccac

SEQ ID NO: 888 - RNA, 19 nt, Artificial Sequence
  Description of Artificial Sequence:  Target Sequence/siNA sense region
caggucuuuauguugaguc

SEQ ID NO: 889 - RNA, 19 nt, Artificial Sequence
  Description of Artificial Sequence:  Target Sequence/siNA sense region
cgcgcaccgaaaaacuaaa

SEQ ID NO: 890 - RNA, 19 nt, Artificial Sequence
  Description of Artificial Sequence:  Target Sequence/siNA sense region
aaauaaugggcgcuuugga

SEQ ID NO: 891 - RNA, 19 nt, Artificial Sequence
  Description of Artificial Sequence:  Target Sequence/siNA sense region
agaagaguguggagucauu

SEQ ID NO: 892 - RNA, 19 nt, Artificial Sequence
  Description of Artificial Sequence:  Target Sequence/siNA sense region
ucucauugaauuauaaaag

SEQ ID NO: 893 - RNA, 19 nt, Artificial Sequence
  Description of Artificial Sequence:  Target Sequence/siNA sense region
gccagcaggcuucaaacua

SEQ ID NO: 894 - RNA, 19 nt, Artificial Sequence
  Description of Artificial Sequence:  Target Sequence/siNA sense region
aggggacaaagcaaaaagu

SEQ ID NO: 895 - RNA, 19 nt, Artificial Sequence
  Description of Artificial Sequence:  Target Sequence/siNA sense region
ugaugauagugguggaguu

SEQ ID NO: 896 - RNA, 19 nt, Artificial Sequence
  Description of Artificial Sequence:  Target Sequence/siNA sense region
uaaucuuaucaagaguugu

SEQ ID NO: 897 - RNA, 19 nt, Artificial Sequence
  Description of Artificial Sequence:  Target Sequence/siNA sense region
ugacaacuuccugagggau

SEQ ID NO: 898 - RNA, 19 nt, Artificial Sequence
  Description of Artificial Sequence:  Target Sequence/siNA sense region
ucuauacuugcuuuguguu

SEQ ID NO: 899 - RNA, 19 nt, Artificial Sequence
  Description of Artificial Sequence:  Target Sequence/siNA sense region
ucuuugugucaacaugaac

SEQ ID NO: 900 - RNA, 19 nt, Artificial Sequence
  Description of Artificial Sequence:  Target Sequence/siNA sense region
caaauuuuauuuguagggg

SEQ ID NO: 901 - RNA, 19 nt, Artificial Sequence
  Description of Artificial Sequence:  Target Sequence/siNA sense region
gaacucauuuggggugcaa

SEQ ID NO: 902 - RNA, 19 nt, Artificial Sequence
  Description of Artificial Sequence:  Target Sequence/siNA sense region
aaugcuaaugucaaacuug

SEQ ID NO: 903 - RNA, 19 nt, Artificial Sequence
  Description of Artificial Sequence:  Target Sequence/siNA sense region
gagucacaaagaacaugua

SEQ ID NO: 904 - RNA, 19 nt, Artificial Sequence
  Description of Artificial Sequence:  Target Sequence/siNA sense region
agaaaacaaaauggauaaa

SEQ ID NO: 905 - RNA, 19 nt, Artificial Sequence
  Description of Artificial Sequence:  Target Sequence/siNA sense region
aaucugauauguauuguuu

SEQ ID NO: 906 - RNA, 19 nt, Artificial Sequence
  Description of Artificial Sequence:  Target Sequence/siNA sense region
ugggauccuauugaaccau

SEQ ID NO: 907 - RNA, 19 nt, Artificial Sequence
  Description of Artificial Sequence:  Target Sequence/siNA sense region
uguuuguggcuauuaaaac

SEQ ID NO: 908 - RNA, 19 nt, Artificial Sequence
  Description of Artificial Sequence:  Target Sequence/siNA sense region
cucuuuuaacagucugggc

SEQ ID NO: 909 - RNA, 19 nt, Artificial Sequence
  Description of Artificial Sequence:  Target Sequence/siNA sense region
cuggguccgguggcucacg

SEQ ID NO: 910 - RNA, 19 nt, Artificial Sequence
  Description of Artificial Sequence:  Target Sequence/siNA sense region
gccuguaaucccagcaauu

SEQ ID NO: 911 - RNA, 19 nt, Artificial Sequence
  Description of Artificial Sequence:  Target Sequence/siNA sense region
uugggaguccgaggcgggc

SEQ ID NO: 912 - RNA, 19 nt, Artificial Sequence
  Description of Artificial Sequence:  Target Sequence/siNA sense region
cggaucacucgaggucagg

SEQ ID NO: 913 - RNA, 19 nt, Artificial Sequence
  Description of Artificial Sequence:  Target Sequence/siNA sense region
gaguuccagaccagccuga

SEQ ID NO: 914 - RNA, 19 nt, Artificial Sequence
  Description of Artificial Sequence:  Target Sequence/siNA sense region
accaaaauggugaaaccuc

SEQ ID NO: 915 - RNA, 19 nt, Artificial Sequence
  Description of Artificial Sequence:  Target Sequence/siNA sense region
ccucucuacuaaaacuaca

SEQ ID NO: 916 - RNA, 19 nt, Artificial Sequence
  Description of Artificial Sequence:  Target Sequence/siNA sense region
aaaaauuaacugggugugg

SEQ ID NO: 917 - RNA, 19 nt, Artificial Sequence
  Description of Artificial Sequence:  Target Sequence/siNA sense region
guggcgcgugccuguaauc

SEQ ID NO: 918 - RNA, 19 nt, Artificial Sequence
  Description of Artificial Sequence:  Target Sequence/siNA sense region
cccagcuacucgggaagcu

SEQ ID NO: 919 - RNA, 19 nt, Artificial Sequence
  Description of Artificial Sequence:  Target Sequence/siNA sense region
ugaggcaggugaauuguuu

SEQ ID NO: 920 - RNA, 19 nt, Artificial Sequence
  Description of Artificial Sequence:  Target Sequence/siNA sense region
ugaaccugggagguggagg

SEQ ID NO: 921 - RNA, 19 nt, Artificial Sequence
  Description of Artificial Sequence:  Target Sequence/siNA sense region
guugcagugagcagagauc

SEQ ID NO: 922 - RNA, 19 nt, Artificial Sequence
  Description of Artificial Sequence:  Target Sequence/siNA sense region
cacaccacugcacucuagc

SEQ ID NO: 923 - RNA, 19 nt, Artificial Sequence
  Description of Artificial Sequence:  Target Sequence/siNA sense region
ccugggugacagagcaaga

SEQ ID NO: 924 - RNA, 19 nt, Artificial Sequence
  Description of Artificial Sequence:  Target Sequence/siNA sense region
acucugucuaaaaaacaaa

SEQ ID NO: 925 - RNA, 19 nt, Artificial Sequence
  Description of Artificial Sequence:  Target Sequence/siNA sense region
aacaaaacaaaacaaaaca

SEQ ID NO: 926 - RNA, 19 nt, Artificial Sequence
  Description of Artificial Sequence:  Target Sequence/siNA sense region
aaaaaaaccucuuaauauu

SEQ ID NO: 927 - RNA, 19 nt, Artificial Sequence
  Description of Artificial Sequence:  Target Sequence/siNA sense region
ucuggagucaucauucccu

SEQ ID NO: 928 - RNA, 19 nt, Artificial Sequence
  Description of Artificial Sequence:  Target Sequence/siNA sense region
uucgacagcauuuuccucu

SEQ ID NO: 929 - RNA, 19 nt, Artificial Sequence
  Description of Artificial Sequence:  Target Sequence/siNA sense region
ugcuuugaaagccccagaa

SEQ ID NO: 930 - RNA, 19 nt, Artificial Sequence
  Description of Artificial Sequence:  Target Sequence/siNA sense region
aaucaguguuggccaugau

SEQ ID NO: 931 - RNA, 19 nt, Artificial Sequence
  Description of Artificial Sequence:  Target Sequence/siNA sense region
ugacaacuacagaaaaacc

SEQ ID NO: 932 - RNA, 19 nt, Artificial Sequence
  Description of Artificial Sequence:  Target Sequence/siNA sense region
cagaggcagcuucuuugcc

SEQ ID NO: 933 - RNA, 19 nt, Artificial Sequence
  Description of Artificial Sequence:  Target Sequence/siNA sense region
caagaccuuucaaagccau

SEQ ID NO: 934 - RNA, 19 nt, Artificial Sequence
  Description of Artificial Sequence:  Target Sequence/siNA sense region
uuuuaggcuguuaggggca

SEQ ID NO: 935 - RNA, 19 nt, Artificial Sequence
  Description of Artificial Sequence:  Target Sequence/siNA sense region
aguggagguagaaugacuc

SEQ ID NO: 936 - RNA, 19 nt, Artificial Sequence
  Description of Artificial Sequence:  Target Sequence/siNA sense region
ccuuggguauuagaguuuc

SEQ ID NO: 937 - RNA, 19 nt, Artificial Sequence
  Description of Artificial Sequence:  Target Sequence/siNA sense region
caaccaugaagucucuaac

SEQ ID NO: 938 - RNA, 19 nt, Artificial Sequence
  Description of Artificial Sequence:  Target Sequence/siNA sense region
caauguauuuucuucaccu

SEQ ID NO: 939 - RNA, 19 nt, Artificial Sequence
  Description of Artificial Sequence:  Target Sequence/siNA sense region
ucugcuacucaaguagcau

SEQ ID NO: 940 - RNA, 19 nt, Artificial Sequence
  Description of Artificial Sequence:  Target Sequence/siNA sense region
uuuacugugucuuugguuu

SEQ ID NO: 941 - RNA, 19 nt, Artificial Sequence
  Description of Artificial Sequence:  Target Sequence/siNA sense region
ugugcuaggcccccgggug

SEQ ID NO: 942 - RNA, 19 nt, Artificial Sequence
  Description of Artificial Sequence:  Target Sequence/siNA sense region
gugaagcacagaccccuuc

SEQ ID NO: 943 - RNA, 19 nt, Artificial Sequence
  Description of Artificial Sequence:  Target Sequence/siNA sense region
ccagggguuuacagucuau

SEQ ID NO: 944 - RNA, 19 nt, Artificial Sequence
  Description of Artificial Sequence:  Target Sequence/siNA sense region
uuugagacuccucaguucu

SEQ ID NO: 945 - RNA, 19 nt, Artificial Sequence
  Description of Artificial Sequence:  Target Sequence/siNA sense region
uugccacuuuuuuuuuuaa

SEQ ID NO: 946 - RNA, 19 nt, Artificial Sequence
  Description of Artificial Sequence:  Target Sequence/siNA sense region
aucuccaccagucauuuuu

SEQ ID NO: 947 - RNA, 19 nt, Artificial Sequence
  Description of Artificial Sequence:  Target Sequence/siNA sense region
ucagaccuuuuaacuccuc

SEQ ID NO: 948 - RNA, 19 nt, Artificial Sequence
  Description of Artificial Sequence:  Target Sequence/siNA sense region
caauuccaacacugauuuc

SEQ ID NO: 949 - RNA, 19 nt, Artificial Sequence
  Description of Artificial Sequence:  Target Sequence/siNA sense region
ccccuuuugcauucucccu

SEQ ID NO: 950 - RNA, 19 nt, Artificial Sequence
  Description of Artificial Sequence:  Target Sequence/siNA sense region
uccuucccuuccuuguagc

SEQ ID NO: 951 - RNA, 19 nt, Artificial Sequence
  Description of Artificial Sequence:  Target Sequence/siNA sense region
ccuuuugacuuucauugga

SEQ ID NO: 952 - RNA, 19 nt, Artificial Sequence
  Description of Artificial Sequence:  Target Sequence/siNA sense region
aaauuaggauguaaaucug

SEQ ID NO: 953 - RNA, 19 nt, Artificial Sequence
  Description of Artificial Sequence:  Target Sequence/siNA sense region
gcucaggagaccuggagga

SEQ ID NO: 954 - RNA, 19 nt, Artificial Sequence
  Description of Artificial Sequence:  Target Sequence/siNA sense region
agcagaggauaauuagcau

SEQ ID NO: 955 - RNA, 19 nt, Artificial Sequence
  Description of Artificial Sequence:  Target Sequence/siNA sense region
ucucagguuaagugugagu

SEQ ID NO: 956 - RNA, 19 nt, Artificial Sequence
  Description of Artificial Sequence:  Target Sequence/siNA sense region
uaaucugagaaacaaugac

SEQ ID NO: 957 - RNA, 19 nt, Artificial Sequence
  Description of Artificial Sequence:  Target Sequence/siNA sense region
cuaauucuugcauauuuug

SEQ ID NO: 958 - RNA, 19 nt, Artificial Sequence
  Description of Artificial Sequence:  Target Sequence/siNA sense region
guaacuuccaugugagggu

SEQ ID NO: 959 - RNA, 19 nt, Artificial Sequence
  Description of Artificial Sequence:  Target Sequence/siNA sense region
uuuucagcauugauauuug

SEQ ID NO: 960 - RNA, 19 nt, Artificial Sequence
  Description of Artificial Sequence:  Target Sequence/siNA sense region
gugcauuuucuaaacagag

SEQ ID NO: 961 - RNA, 19 nt, Artificial Sequence
  Description of Artificial Sequence:  Target Sequence/siNA sense region
gaugaggugguaucuucac

SEQ ID NO: 962 - RNA, 19 nt, Artificial Sequence
  Description of Artificial Sequence:  Target Sequence/siNA sense region
cguagaacauugguauucg

SEQ ID NO: 963 - RNA, 19 nt, Artificial Sequence
  Description of Artificial Sequence:  Target Sequence/siNA sense region
gcuugagaaaaaaagaaua

SEQ ID NO: 964 - RNA, 19 nt, Artificial Sequence
  Description of Artificial Sequence:  Target Sequence/siNA sense region
aguugaaccuauuucucuu

SEQ ID NO: 965 - RNA, 19 nt, Artificial Sequence
  Description of Artificial Sequence:  Target Sequence/siNA sense region
uucuuuacaagaugggucc

SEQ ID NO: 966 - RNA, 19 nt, Artificial Sequence
  Description of Artificial Sequence:  Target Sequence/siNA sense region
caggauuccucuuuucucu

SEQ ID NO: 967 - RNA, 19 nt, Artificial Sequence
  Description of Artificial Sequence:  Target Sequence/siNA sense region
ugccauaaaugauuaauua

SEQ ID NO: 968 - RNA, 19 nt, Artificial Sequence
  Description of Artificial Sequence:  Target Sequence/siNA sense region
aaauagcuuuugugucuua

SEQ ID NO: 969 - RNA, 19 nt, Artificial Sequence
  Description of Artificial Sequence:  Target Sequence/siNA sense region
acauugguagccagccagc

SEQ ID NO: 970 - RNA, 19 nt, Artificial Sequence
  Description of Artificial Sequence:  Target Sequence/siNA sense region
ccaaggcucuguuuaugcu

SEQ ID NO: 971 - RNA, 19 nt, Artificial Sequence
  Description of Artificial Sequence:  Target Sequence/siNA sense region
uuuuggggggcauauauug

SEQ ID NO: 972 - RNA, 19 nt, Artificial Sequence
  Description of Artificial Sequence:  Target Sequence/siNA sense region
ggguuccauucucaccuau

SEQ ID NO: 973 - RNA, 19 nt, Artificial Sequence
  Description of Artificial Sequence:  Target Sequence/siNA sense region
uccacacaacauauccgua

SEQ ID NO: 974 - RNA, 19 nt, Artificial Sequence
  Description of Artificial Sequence:  Target Sequence/siNA sense region
auauauccccucuacucuu

SEQ ID NO: 975 - RNA, 19 nt, Artificial Sequence
  Description of Artificial Sequence:  Target Sequence/siNA sense region
uacuucccccaaauuuaaa

SEQ ID NO: 976 - RNA, 19 nt, Artificial Sequence
  Description of Artificial Sequence:  Target Sequence/siNA sense region
agaaguaugggaaaugaga

SEQ ID NO: 977 - RNA, 19 nt, Artificial Sequence
  Description of Artificial Sequence:  Target Sequence/siNA sense region
aggcauuucccccacccca

SEQ ID NO: 978 - RNA, 19 nt, Artificial Sequence
  Description of Artificial Sequence:  Target Sequence/siNA sense region
auuucucuccucacacaca

SEQ ID NO: 979 - RNA, 19 nt, Artificial Sequence
  Description of Artificial Sequence:  Target Sequence/siNA sense region
agacucauauuacugguag

SEQ ID NO: 980 - RNA, 19 nt, Artificial Sequence
  Description of Artificial Sequence:  Target Sequence/siNA sense region
ggaacuugagaacuuuauu

SEQ ID NO: 981 - RNA, 19 nt, Artificial Sequence
  Description of Artificial Sequence:  Target Sequence/siNA sense region
uuccaaguuguucaaacau

SEQ ID NO: 982 - RNA, 19 nt, Artificial Sequence
  Description of Artificial Sequence:  Target Sequence/siNA sense region
uuuaccaaucauauuaaua

SEQ ID NO: 983 - RNA, 19 nt, Artificial Sequence
  Description of Artificial Sequence:  Target Sequence/siNA sense region
acaaugaugcuauuugcaa

SEQ ID NO: 984 - RNA, 19 nt, Artificial Sequence
  Description of Artificial Sequence:  Target Sequence/siNA sense region
auuccugcuccuaggggag

SEQ ID NO: 985 - RNA, 19 nt, Artificial Sequence
  Description of Artificial Sequence:  Target Sequence/siNA sense region
ggggagauaagaaacccuc

SEQ ID NO: 986 - RNA, 19 nt, Artificial Sequence
  Description of Artificial Sequence:  Target Sequence/siNA sense region
cacucucuacagguuuggg

SEQ ID NO: 987 - RNA, 19 nt, Artificial Sequence
  Description of Artificial Sequence:  Target Sequence/siNA sense region
guacaaguggcaaccugcu

SEQ ID NO: 988 - RNA, 19 nt, Artificial Sequence
  Description of Artificial Sequence:  Target Sequence/siNA sense region
uuccauggccguguagaag

SEQ ID NO: 989 - RNA, 19 nt, Artificial Sequence
  Description of Artificial Sequence:  Target Sequence/siNA sense region
gcauggugcccuggcuucu

SEQ ID NO: 990 - RNA, 19 nt, Artificial Sequence
  Description of Artificial Sequence:  Target Sequence/siNA sense region
ucugaggaagcugggguuc

SEQ ID NO: 991 - RNA, 19 nt, Artificial Sequence
  Description of Artificial Sequence:  Target Sequence/siNA sense region
caugacaauggcagaugua

SEQ ID NO: 992 - RNA, 19 nt, Artificial Sequence
  Description of Artificial Sequence:  Target Sequence/siNA sense region
aaaguuauucuugaaguca

SEQ ID NO: 993 - RNA, 19 nt, Artificial Sequence
  Description of Artificial Sequence:  Target Sequence/siNA sense region
agauugaggcugggagaca

SEQ ID NO: 994 - RNA, 19 nt, Artificial Sequence
  Description of Artificial Sequence:  Target Sequence/siNA sense region
agccguaguagauguucua

SEQ ID NO: 995 - RNA, 19 nt, Artificial Sequence
  Description of Artificial Sequence:  Target Sequence/siNA sense region
acuuuguucugcuguucuc

SEQ ID NO: 996 - RNA, 19 nt, Artificial Sequence
  Description of Artificial Sequence:  Target Sequence/siNA sense region
cuagaaagaauauuugguu

SEQ ID NO: 997 - RNA, 19 nt, Artificial Sequence
  Description of Artificial Sequence:  Target Sequence/siNA sense region
uuuccuguauaggaaugag

SEQ ID NO: 998 - RNA, 19 nt, Artificial Sequence
  Description of Artificial Sequence:  Target Sequence/siNA sense region
gauuaauuccuuuccaggu

SEQ ID NO: 999 - RNA, 19 nt, Artificial Sequence
  Description of Artificial Sequence:  Target Sequence/siNA sense region
uauuuuauaauucugggaa

SEQ ID NO: 1000 - RNA, 19 nt, Artificial Sequence
  Description of Artificial Sequence:  Target Sequence/siNA sense region
agcaaaacccaugccuccc

SEQ ID NO: 1001 - RNA, 19 nt, Artificial Sequence
  Description of Artificial Sequence:  Target Sequence/siNA sense region
cccuagccauuuuuacugu

SEQ ID NO: 1002 - RNA, 19 nt, Artificial Sequence
  Description of Artificial Sequence:  Target Sequence/siNA sense region
uuauccuauuuagauggcc

SEQ ID NO: 1003 - RNA, 19 nt, Artificial Sequence
  Description of Artificial Sequence:  Target Sequence/siNA sense region
caugaagaggaugcuguga

SEQ ID NO: 1004 - RNA, 19 nt, Artificial Sequence
  Description of Artificial Sequence:  Target Sequence/siNA sense region
aaauucccaacaaacauug

SEQ ID NO: 1005 - RNA, 19 nt, Artificial Sequence
  Description of Artificial Sequence:  Target Sequence/siNA sense region
gaugcugacagucaugcag

SEQ ID NO: 1006 - RNA, 19 nt, Artificial Sequence
  Description of Artificial Sequence:  Target Sequence/siNA sense region
gucugggaguggggaagug

SEQ ID NO: 1007 - RNA, 19 nt, Artificial Sequence
  Description of Artificial Sequence:  Target Sequence/siNA sense region
gaucuuuuguucccauccu

SEQ ID NO: 1008 - RNA, 19 nt, Artificial Sequence
  Description of Artificial Sequence:  Target Sequence/siNA sense region
ucuucuuuuagcaguaaaa

SEQ ID NO: 1009 - RNA, 19 nt, Artificial Sequence
  Description of Artificial Sequence:  Target Sequence/siNA sense region
auagcugagggaaaaggga

SEQ ID NO: 1010 - RNA, 19 nt, Artificial Sequence
  Description of Artificial Sequence:  Target Sequence/siNA sense region
agggaaaaggaaguuaugg

SEQ ID NO: 1011 - RNA, 19 nt, Artificial Sequence
  Description of Artificial Sequence:  Target Sequence/siNA sense region
ggaauaccuguggugguug

SEQ ID NO: 1012 - RNA, 19 nt, Artificial Sequence
  Description of Artificial Sequence:  Target Sequence/siNA sense region
gugaucccuaggucuuggg

SEQ ID NO: 1013 - RNA, 19 nt, Artificial Sequence
  Description of Artificial Sequence:  Target Sequence/siNA sense region
gagcucuuggaggugucug

SEQ ID NO: 1014 - RNA, 19 nt, Artificial Sequence
  Description of Artificial Sequence:  Target Sequence/siNA sense region
guaucaguggauuucccau

SEQ ID NO: 1015 - RNA, 19 nt, Artificial Sequence
  Description of Artificial Sequence:  Target Sequence/siNA sense region
uccccugugggaaauuagu

SEQ ID NO: 1016 - RNA, 19 nt, Artificial Sequence
  Description of Artificial Sequence:  Target Sequence/siNA sense region
uaggcucauuuacuguuuu

SEQ ID NO: 1017 - RNA, 19 nt, Artificial Sequence
  Description of Artificial Sequence:  Target Sequence/siNA sense region
uaggucuagccuaugugga

SEQ ID NO: 1018 - RNA, 19 nt, Artificial Sequence
  Description of Artificial Sequence:  Target Sequence/siNA sense region
auuuuuuccuaacauaccu

SEQ ID NO: 1019 - RNA, 19 nt, Artificial Sequence
  Description of Artificial Sequence:  Target Sequence/siNA sense region
uaagcaaacccagugucag

SEQ ID NO: 1020 - RNA, 19 nt, Artificial Sequence
  Description of Artificial Sequence:  Target Sequence/siNA sense region
ggaugguaauucuuauucu

SEQ ID NO: 1021 - RNA, 19 nt, Artificial Sequence
  Description of Artificial Sequence:  Target Sequence/siNA sense region
uuucguucaguuaaguuuu

SEQ ID NO: 1022 - RNA, 19 nt, Artificial Sequence
  Description of Artificial Sequence:  Target Sequence/siNA sense region
uucccuucaucugggcacu

SEQ ID NO: 1023 - RNA, 19 nt, Artificial Sequence
  Description of Artificial Sequence:  Target Sequence/siNA sense region
ugaagggauaugugaaaca

SEQ ID NO: 1024 - RNA, 19 nt, Artificial Sequence
  Description of Artificial Sequence:  Target Sequence/siNA sense region
aauguuaacauuuuuggua

SEQ ID NO: 1025 - RNA, 19 nt, Artificial Sequence
  Description of Artificial Sequence:  Target Sequence/siNA sense region
agucuucaaccagggauug

SEQ ID NO: 1026 - RNA, 19 nt, Artificial Sequence
  Description of Artificial Sequence:  Target Sequence/siNA sense region
guuucuguuuaacuucuua

SEQ ID NO: 1027 - RNA, 19 nt, Artificial Sequence
  Description of Artificial Sequence:  Target Sequence/siNA sense region
auaggaaagcuugaguaaa

SEQ ID NO: 1028 - RNA, 19 nt, Artificial Sequence
  Description of Artificial Sequence:  Target Sequence/siNA sense region
aauaaauauugucuuuuug

SEQ ID NO: 1029 - RNA, 19 nt, Artificial Sequence
  Description of Artificial Sequence:  Target Sequence/siNA sense region
auauugucuuuuuguaugu

SEQ ID NO: 1030 - RNA, 19 nt, Artificial Sequence
  Description of Artificial Sequence:  siNA antisense region
ggccgggcuggagccuugg

SEQ ID NO: 1031 - RNA, 19 nt, Artificial Sequence
  Description of Artificial Sequence:  siNA antisense region
ccucucgccucggagcccg

SEQ ID NO: 1032 - RNA, 19 nt, Artificial Sequence
  Description of Artificial Sequence:  siNA antisense region
gccggccacuccaugcagc

SEQ ID NO: 1033 - RNA, 19 nt, Artificial Sequence
  Description of Artificial Sequence:  siNA antisense region
cacagcccgcagagccgcg

SEQ ID NO: 1034 - RNA, 19 nt, Artificial Sequence
  Description of Artificial Sequence:  siNA antisense region
gcgcagagcagcagcgccc

SEQ ID NO: 1035 - RNA, 19 nt, Artificial Sequence
  Description of Artificial Sequence:  siNA antisense region
cccccgcccccgccgccgg

SEQ ID NO: 1036 - RNA, 19 nt, Artificial Sequence
  Description of Artificial Sequence:  siNA antisense region
guaggcgcggcgcccccgc

SEQ ID NO: 1037 - RNA, 19 nt, Artificial Sequence
  Description of Artificial Sequence:  siNA antisense region
acagguggcugaguuuccg

SEQ ID NO: 1038 - RNA, 19 nt, Artificial Sequence
  Description of Artificial Sequence:  siNA antisense region
gagacacucaaauuuguca

SEQ ID NO: 1039 - RNA, 19 nt, Artificial Sequence
  Description of Artificial Sequence:  siNA antisense region
gugcagagguuuucaacag

SEQ ID NO: 1040 - RNA, 19 nt, Artificial Sequence
  Description of Artificial Sequence:  siNA antisense region
uuccauguccauauuacug

SEQ ID NO: 1041 - RNA, 19 nt, Artificial Sequence
  Description of Artificial Sequence:  siNA antisense region
cuggcucccucggguggau

SEQ ID NO: 1042 - RNA, 19 nt, Artificial Sequence
  Description of Artificial Sequence:  siNA antisense region
cauagacuacaauuugagc

SEQ ID NO: 1043 - RNA, 19 nt, Artificial Sequence
  Description of Artificial Sequence:  siNA antisense region
ccaaaaugacuaaaauacc

SEQ ID NO: 1044 - RNA, 19 nt, Artificial Sequence
  Description of Artificial Sequence:  siNA antisense region
uucuuaucuuguuugucgc

SEQ ID NO: 1045 - RNA, 19 nt, Artificial Sequence
  Description of Artificial Sequence:  siNA antisense region
cgaguuuccggagcuauuu

SEQ ID NO: 1046 - RNA, 19 nt, Artificial Sequence
  Description of Artificial Sequence:  siNA antisense region
gguacuucuauugaacgac

SEQ ID NO: 1047 - RNA, 19 nt, Artificial Sequence
  Description of Artificial Sequence:  siNA antisense region
caaauccucucauucaggg

SEQ ID NO: 1048 - RNA, 19 nt, Artificial Sequence
  Description of Artificial Sequence:  siNA antisense region
ugggaccccacuugcagac

SEQ ID NO: 1049 - RNA, 19 nt, Artificial Sequence
  Description of Artificial Sequence:  siNA antisense region
cucucauuggugcuacacu

SEQ ID NO: 1050 - RNA, 19 nt, Artificial Sequence
  Description of Artificial Sequence:  siNA antisense region
aaaaugcuaggcuucucac

SEQ ID NO: 1051 - RNA, 19 nt, Artificial Sequence
  Description of Artificial Sequence:  siNA antisense region
gagaugcauuuuucaacca

SEQ ID NO: 1052 - RNA, 19 nt, Artificial Sequence
  Description of Artificial Sequence:  siNA antisense region
ggaucaccuucugggggug

SEQ ID NO: 1053 - RNA, 19 nt, Artificial Sequence
  Description of Artificial Sequence:  siNA antisense region
ucagucacagcagacucag

SEQ ID NO: 1054 - RNA, 19 nt, Artificial Sequence
  Description of Artificial Sequence:  siNA antisense region
ugccaaaugcauugaagcu

SEQ ID NO: 1055 - RNA, 19 nt, Artificial Sequence
  Description of Artificial Sequence:  siNA antisense region
uucauguagcucagguugu

SEQ ID NO: 1056 - RNA, 19 nt, Artificial Sequence
  Description of Artificial Sequence:  siNA antisense region
ccagggagccaagaacacu

SEQ ID NO: 1057 - RNA, 19 nt, Artificial Sequence
  Description of Artificial Sequence:  siNA antisense region
ucgggacugguauuccuuc

SEQ ID NO: 1058 - RNA, 19 nt, Artificial Sequence
  Description of Artificial Sequence:  siNA antisense region
uagagaguauaguuagugu

SEQ ID NO: 1059 - RNA, 19 nt, Artificial Sequence
  Description of Artificial Sequence:  siNA antisense region
aggcuucugugccaauagu

SEQ ID NO: 1060 - RNA, 19 nt, Artificial Sequence
  Description of Artificial Sequence:  siNA antisense region
cauugaugaauuuuuucca

SEQ ID NO: 1061 - RNA, 19 nt, Artificial Sequence
  Description of Artificial Sequence:  siNA antisense region
ucucuaaagauguuuucac

SEQ ID NO: 1062 - RNA, 19 nt, Artificial Sequence
  Description of Artificial Sequence:  siNA antisense region
caaccaaaguauuggccuu

SEQ ID NO: 1063 - RNA, 19 nt, Artificial Sequence
  Description of Artificial Sequence:  siNA antisense region
uuggucagaucaaaggaac

SEQ ID NO: 1064 - RNA, 19 nt, Artificial Sequence
  Description of Artificial Sequence:  siNA antisense region
aaacuggaauccuucacuu

SEQ ID NO: 1065 - RNA, 19 nt, Artificial Sequence
  Description of Artificial Sequence:  siNA antisense region
uggacacuguguuguucaa

SEQ ID NO: 1066 - RNA, 19 nt, Artificial Sequence
  Description of Artificial Sequence:  siNA antisense region
uuauccuugaccauuauuu

SEQ ID NO: 1067 - RNA, 19 nt, Artificial Sequence
  Description of Artificial Sequence:  siNA antisense region
gguuuaauuuuuccugcau

SEQ ID NO: 1068 - RNA, 19 nt, Artificial Sequence
  Description of Artificial Sequence:  siNA antisense region
ggcacuauauugaaggaug

SEQ ID NO: 1069 - RNA, 19 nt, Artificial Sequence
  Description of Artificial Sequence:  siNA antisense region
uucacacgggaaguuaaag

SEQ ID NO: 1070 - RNA, 19 nt, Artificial Sequence
  Description of Artificial Sequence:  siNA antisense region
auauguggaggaucagguu

SEQ ID NO: 1071 - RNA, 19 nt, Artificial Sequence
  Description of Artificial Sequence:  siNA antisense region
uggaaggagagguuuuuaa

SEQ ID NO: 1072 - RNA, 19 nt, Artificial Sequence
  Description of Artificial Sequence:  siNA antisense region
acauauaggucaucauugu

SEQ ID NO: 1073 - RNA, 19 nt, Artificial Sequence
  Description of Artificial Sequence:  siNA antisense region
uguggauucucccauugca

SEQ ID NO: 1074 - RNA, 19 nt, Artificial Sequence
  Description of Artificial Sequence:  siNA antisense region
caucugcuaauaaaauucu

SEQ ID NO: 1075 - RNA, 19 nt, Artificial Sequence
  Description of Artificial Sequence:  siNA antisense region
ucuacuucauaaaauaggc

SEQ ID NO: 1076 - RNA, 19 nt, Artificial Sequence
  Description of Artificial Sequence:  siNA antisense region
guuuggcuguuauugacuu

SEQ ID NO: 1077 - RNA, 19 nt, Artificial Sequence
  Description of Artificial Sequence:  siNA antisense region
aaaacauuaugugucucag

SEQ ID NO: 1078 - RNA, 19 nt, Artificial Sequence
  Description of Artificial Sequence:  siNA antisense region
uuagccucuuggacguaga

SEQ ID NO: 1079 - RNA, 19 nt, Artificial Sequence
  Description of Artificial Sequence:  siNA antisense region
aauucuggauucucacauu

SEQ ID NO: 1080 - RNA, 19 nt, Artificial Sequence
  Description of Artificial Sequence:  siNA antisense region
uucuccacauuucucucaa

SEQ ID NO: 1081 - RNA, 19 nt, Artificial Sequence
  Description of Artificial Sequence:  siNA antisense region
accaugaaacaagauguau

SEQ ID NO: 1082 - RNA, 19 nt, Artificial Sequence
  Description of Artificial Sequence:  siNA antisense region
ucaggaagaacaccaggga

SEQ ID NO: 1083 - RNA, 19 nt, Artificial Sequence
  Description of Artificial Sequence:  siNA antisense region
cugacuguguucaaaguau

SEQ ID NO: 1084 - RNA, 19 nt, Artificial Sequence
  Description of Artificial Sequence:  siNA antisense region
uuuguuuugacucuuauuc

SEQ ID NO: 1085 - RNA, 19 nt, Artificial Sequence
  Description of Artificial Sequence:  siNA antisense region
uccucauagcauaacuuau

SEQ ID NO: 1086 - RNA, 19 nt, Artificial Sequence
  Description of Artificial Sequence:  siNA antisense region
uuacuccagaguuugucau

SEQ ID NO: 1087 - RNA, 19 nt, Artificial Sequence
  Description of Artificial Sequence:  siNA antisense region
cucauuucuuggcuccaau

SEQ ID NO: 1088 - RNA, 19 nt, Artificial Sequence
  Description of Artificial Sequence:  siNA antisense region
uugcgcuucuuaccuauac

SEQ ID NO: 1089 - RNA, 19 nt, Artificial Sequence
  Description of Artificial Sequence:  siNA antisense region
guuauguagaguguggaau

SEQ ID NO: 1090 - RNA, 19 nt, Artificial Sequence
  Description of Artificial Sequence:  siNA antisense region
ggaacaaugaguaacaugg

SEQ ID NO: 1091 - RNA, 19 nt, Artificial Sequence
  Description of Artificial Sequence:  siNA antisense region
gcaccugcgacgaugacug

SEQ ID NO: 1092 - RNA, 19 nt, Artificial Sequence
  Description of Artificial Sequence:  siNA antisense region
agcaggaguacuaugauug

SEQ ID NO: 1093 - RNA, 19 nt, Artificial Sequence
  Description of Artificial Sequence:  siNA antisense region
uugagccuuuuuagguaaa

SEQ ID NO: 1094 - RNA, 19 nt, Artificial Sequence
  Description of Artificial Sequence:  siNA antisense region
ggagggaauauaauaaucu

SEQ ID NO: 1095 - RNA, 19 nt, Artificial Sequence
  Description of Artificial Sequence:  siNA antisense region
uugccaggaucaggaauug

SEQ ID NO: 1096 - RNA, 19 nt, Artificial Sequence
  Description of Artificial Sequence:  siNA antisense region
aacauuucuuuaaaaaucu

SEQ ID NO: 1097 - RNA, 19 nt, Artificial Sequence
  Description of Artificial Sequence:  siNA antisense region
ucaucauucuggucuccaa

SEQ ID NO: 1098 - RNA, 19 nt, Artificial Sequence
  Description of Artificial Sequence:  siNA antisense region
uucuuccagugcagaguau

SEQ ID NO: 1099 - RNA, 19 nt, Artificial Sequence
  Description of Artificial Sequence:  siNA antisense region
uucucauagaugucguacu

SEQ ID NO: 1100 - RNA, 19 nt, Artificial Sequence
  Description of Artificial Sequence:  siNA antisense region
guuuccuccuugguuugcu

SEQ ID NO: 1101 - RNA, 19 nt, Artificial Sequence
  Description of Artificial Sequence:  siNA antisense region
aucagcacuacagagucgg

SEQ ID NO: 1102 - RNA, 19 nt, Artificial Sequence
  Description of Artificial Sequence:  siNA antisense region
gcuuucuucagguuuucua

SEQ ID NO: 1103 - RNA, 19 nt, Artificial Sequence
  Description of Artificial Sequence:  siNA antisense region
uaucuccaucacugagagg

SEQ ID NO: 1104 - RNA, 19 nt, Artificial Sequence
  Description of Artificial Sequence:  siNA antisense region
gugaagguaaaaauaaauu

SEQ ID NO: 1105 - RNA, 19 nt, Artificial Sequence
  Description of Artificial Sequence:  siNA antisense region
aaucuucucaaggucacag

SEQ ID NO: 1106 - RNA, 19 nt, Artificial Sequence
  Description of Artificial Sequence:  siNA antisense region
caaauggagaaugggaaga

SEQ ID NO: 1107 - RNA, 19 nt, Artificial Sequence
  Description of Artificial Sequence:  siNA antisense region
uaauaaguucccagauaac

SEQ ID NO: 1108 - RNA, 19 nt, Artificial Sequence
  Description of Artificial Sequence:  siNA antisense region
guaguuucaguuuccauuu

SEQ ID NO: 1109 - RNA, 19 nt, Artificial Sequence
  Description of Artificial Sequence:  siNA antisense region
cuguuuuuaaauggugcag

SEQ ID NO: 1110 - RNA, 19 nt, Artificial Sequence
  Description of Artificial Sequence:  siNA antisense region
guggcucuuaugagcugcc

SEQ ID NO: 1111 - RNA, 19 nt, Artificial Sequence
  Description of Artificial Sequence:  siNA antisense region
gacucaacauaaagaccug

SEQ ID NO: 1112 - RNA, 19 nt, Artificial Sequence
  Description of Artificial Sequence:  siNA antisense region
uuuaguuuuucggugcgcg

SEQ ID NO: 1113 - RNA, 19 nt, Artificial Sequence
  Description of Artificial Sequence:  siNA antisense region
uccaaagcgcccauuauuu

SEQ ID NO: 1114 - RNA, 19 nt, Artificial Sequence
  Description of Artificial Sequence:  siNA antisense region
aaugacuccacacucuucu

SEQ ID NO: 1115 - RNA, 19 nt, Artificial Sequence
  Description of Artificial Sequence:  siNA antisense region
cuuuuauaauucaaugaga

SEQ ID NO: 1116 - RNA, 19 nt, Artificial Sequence
  Description of Artificial Sequence:  siNA antisense region
uaguuugaagccugcuggc

SEQ ID NO: 1117 - RNA, 19 nt, Artificial Sequence
  Description of Artificial Sequence:  siNA antisense region
acuuuuugcuuuguccccu

SEQ ID NO: 1118 - RNA, 19 nt, Artificial Sequence
  Description of Artificial Sequence:  siNA antisense region
aacuccaccacuaucauca

SEQ ID NO: 1119 - RNA, 19 nt, Artificial Sequence
  Description of Artificial Sequence:  siNA antisense region
acaacucuugauaagauua

SEQ ID NO: 1120 - RNA, 19 nt, Artificial Sequence
  Description of Artificial Sequence:  siNA antisense region
aucccucaggaaguuguca

SEQ ID NO: 1121 - RNA, 19 nt, Artificial Sequence
  Description of Artificial Sequence:  siNA antisense region
aacacaaagcaaguauaga

SEQ ID NO: 1122 - RNA, 19 nt, Artificial Sequence
  Description of Artificial Sequence:  siNA antisense region
guucauguugacacaaaga

SEQ ID NO: 1123 - RNA, 19 nt, Artificial Sequence
  Description of Artificial Sequence:  siNA antisense region
ccccuacaaauaaaauuug

SEQ ID NO: 1124 - RNA, 19 nt, Artificial Sequence
  Description of Artificial Sequence:  siNA antisense region
uugcaccccaaaugaguuc

SEQ ID NO: 1125 - RNA, 19 nt, Artificial Sequence
  Description of Artificial Sequence:  siNA antisense region
caaguuugacauuagcauu

SEQ ID NO: 1126 - RNA, 19 nt, Artificial Sequence
  Description of Artificial Sequence:  siNA antisense region
uacauguucuuugugacuc

SEQ ID NO: 1127 - RNA, 19 nt, Artificial Sequence
  Description of Artificial Sequence:  siNA antisense region
uuuauccauuuuguuuucu

SEQ ID NO: 1128 - RNA, 19 nt, Artificial Sequence
  Description of Artificial Sequence:  siNA antisense region
aaacaauacauaucagauu

SEQ ID NO: 1129 - RNA, 19 nt, Artificial Sequence
  Description of Artificial Sequence:  siNA antisense region
augguucaauaggauccca

SEQ ID NO: 1130 - RNA, 19 nt, Artificial Sequence
  Description of Artificial Sequence:  siNA antisense region
guuuuaauagccacaaaca

SEQ ID NO: 1131 - RNA, 19 nt, Artificial Sequence
  Description of Artificial Sequence:  siNA antisense region
gcccagacuguuaaaagag

SEQ ID NO: 1132 - RNA, 19 nt, Artificial Sequence
  Description of Artificial Sequence:  siNA antisense region
cgugagccaccggacccag

SEQ ID NO: 1133 - RNA, 19 nt, Artificial Sequence
  Description of Artificial Sequence:  siNA antisense region
aauugcugggauuacaggc

SEQ ID NO: 1134 - RNA, 19 nt, Artificial Sequence
  Description of Artificial Sequence:  siNA antisense region
gcccgccucggacucccaa

SEQ ID NO: 1135 - RNA, 19 nt, Artificial Sequence
  Description of Artificial Sequence:  siNA antisense region
ccugaccucgagugauccg

SEQ ID NO: 1136 - RNA, 19 nt, Artificial Sequence
  Description of Artificial Sequence:  siNA antisense region
ucaggcuggucuggaacuc

SEQ ID NO: 1137 - RNA, 19 nt, Artificial Sequence
  Description of Artificial Sequence:  siNA antisense region
gagguuucaccauuuuggu

SEQ ID NO: 1138 - RNA, 19 nt, Artificial Sequence
  Description of Artificial Sequence:  siNA antisense region
uguaguuuuaguagagagg

SEQ ID NO: 1139 - RNA, 19 nt, Artificial Sequence
  Description of Artificial Sequence:  siNA antisense region
ccacacccaguuaauuuuu

SEQ ID NO: 1140 - RNA, 19 nt, Artificial Sequence
  Description of Artificial Sequence:  siNA antisense region
gauuacaggcacgcgccac

SEQ ID NO: 1141 - RNA, 19 nt, Artificial Sequence
  Description of Artificial Sequence:  siNA antisense region
agcuucccgaguagcuggg

SEQ ID NO: 1142 - RNA, 19 nt, Artificial Sequence
  Description of Artificial Sequence:  siNA antisense region
aaacaauucaccugccuca

SEQ ID NO: 1143 - RNA, 19 nt, Artificial Sequence
  Description of Artificial Sequence:  siNA antisense region
ccuccaccucccagguuca

SEQ ID NO: 1144 - RNA, 19 nt, Artificial Sequence
  Description of Artificial Sequence:  siNA antisense region
gaucucugcucacugcaac

SEQ ID NO: 1145 - RNA, 19 nt, Artificial Sequence
  Description of Artificial Sequence:  siNA antisense region
gcuagagugcaguggugug

SEQ ID NO: 1146 - RNA, 19 nt, Artificial Sequence
  Description of Artificial Sequence:  siNA antisense region
ucuugcucugucacccagg

SEQ ID NO: 1147 - RNA, 19 nt, Artificial Sequence
  Description of Artificial Sequence:  siNA antisense region
uuuguuuuuuagacagagu

SEQ ID NO: 1148 - RNA, 19 nt, Artificial Sequence
  Description of Artificial Sequence:  siNA antisense region
uguuuuguuuuguuuuguu

SEQ ID NO: 1149 - RNA, 19 nt, Artificial Sequence
  Description of Artificial Sequence:  siNA antisense region
aauauuaagagguuuuuuu

SEQ ID NO: 1150 - RNA, 19 nt, Artificial Sequence
  Description of Artificial Sequence:  siNA antisense region
agggaaugaugacuccaga

SEQ ID NO: 1151 - RNA, 19 nt, Artificial Sequence
  Description of Artificial Sequence:  siNA antisense region
agaggaaaaugcugucgaa

SEQ ID NO: 1152 - RNA, 19 nt, Artificial Sequence
  Description of Artificial Sequence:  siNA antisense region
uucuggggcuuucaaagca

SEQ ID NO: 1153 - RNA, 19 nt, Artificial Sequence
  Description of Artificial Sequence:  siNA antisense region
aucauggccaacacugauu

SEQ ID NO: 1154 - RNA, 19 nt, Artificial Sequence
  Description of Artificial Sequence:  siNA antisense region
gguuuuucuguaguuguca

SEQ ID NO: 1155 - RNA, 19 nt, Artificial Sequence
  Description of Artificial Sequence:  siNA antisense region
ggcaaagaagcugccucug

SEQ ID NO: 1156 - RNA, 19 nt, Artificial Sequence
  Description of Artificial Sequence:  siNA antisense region
auggcuuugaaaggucuug

SEQ ID NO: 1157 - RNA, 19 nt, Artificial Sequence
  Description of Artificial Sequence:  siNA antisense region
ugccccuaacagccuaaaa

SEQ ID NO: 1158 - RNA, 19 nt, Artificial Sequence
  Description of Artificial Sequence:  siNA antisense region
gagucauucuaccuccacu

SEQ ID NO: 1159 - RNA, 19 nt, Artificial Sequence
  Description of Artificial Sequence:  siNA antisense region
gaaacucuaauacccaagg

SEQ ID NO: 1160 - RNA, 19 nt, Artificial Sequence
  Description of Artificial Sequence:  siNA antisense region
guuagagacuucaugguug

SEQ ID NO: 1161 - RNA, 19 nt, Artificial Sequence
  Description of Artificial Sequence:  siNA antisense region
aggugaagaaaauacauug

SEQ ID NO: 1162 - RNA, 19 nt, Artificial Sequence
  Description of Artificial Sequence:  siNA antisense region
augcuacuugaguagcaga

SEQ ID NO: 1163 - RNA, 19 nt, Artificial Sequence
  Description of Artificial Sequence:  siNA antisense region
aaaccaaagacacaguaaa

SEQ ID NO: 1164 - RNA, 19 nt, Artificial Sequence
  Description of Artificial Sequence:  siNA antisense region
cacccgggggccuagcaca

SEQ ID NO: 1165 - RNA, 19 nt, Artificial Sequence
  Description of Artificial Sequence:  siNA antisense region
gaaggggucugugcuucac

SEQ ID NO: 1166 - RNA, 19 nt, Artificial Sequence
  Description of Artificial Sequence:  siNA antisense region
auagacuguaaaccccugg

SEQ ID NO: 1167 - RNA, 19 nt, Artificial Sequence
  Description of Artificial Sequence:  siNA antisense region
agaacugaggagucucaaa

SEQ ID NO: 1168 - RNA, 19 nt, Artificial Sequence
  Description of Artificial Sequence:  siNA antisense region
uuaaaaaaaaaaguggcaa

SEQ ID NO: 1169 - RNA, 19 nt, Artificial Sequence
  Description of Artificial Sequence:  siNA antisense region
aaaaaugacugguggagau

SEQ ID NO: 1170 - RNA, 19 nt, Artificial Sequence
  Description of Artificial Sequence:  siNA antisense region
gaggaguuaaaaggucuga

SEQ ID NO: 1171 - RNA, 19 nt, Artificial Sequence
  Description of Artificial Sequence:  siNA antisense region
gaaaucaguguuggaauug

SEQ ID NO: 1172 - RNA, 19 nt, Artificial Sequence
  Description of Artificial Sequence:  siNA antisense region
agggagaaugcaaaagggg

SEQ ID NO: 1173 - RNA, 19 nt, Artificial Sequence
  Description of Artificial Sequence:  siNA antisense region
gcuacaaggaagggaagga

SEQ ID NO: 1174 - RNA, 19 nt, Artificial Sequence
  Description of Artificial Sequence:  siNA antisense region
uccaaugaaagucaaaagg

SEQ ID NO: 1175 - RNA, 19 nt, Artificial Sequence
  Description of Artificial Sequence:  siNA antisense region
cagauuuacauccuaauuu

SEQ ID NO: 1176 - RNA, 19 nt, Artificial Sequence
  Description of Artificial Sequence:  siNA antisense region
uccuccaggucuccugagc

SEQ ID NO: 1177 - RNA, 19 nt, Artificial Sequence
  Description of Artificial Sequence:  siNA antisense region
augcuaauuauccucugcu

SEQ ID NO: 1178 - RNA, 19 nt, Artificial Sequence
  Description of Artificial Sequence:  siNA antisense region
acucacacuuaaccugaga

SEQ ID NO: 1179 - RNA, 19 nt, Artificial Sequence
  Description of Artificial Sequence:  siNA antisense region
gucauuguuucucagauua

SEQ ID NO: 1180 - RNA, 19 nt, Artificial Sequence
  Description of Artificial Sequence:  siNA antisense region
caaaauaugcaagaauuag

SEQ ID NO: 1181 - RNA, 19 nt, Artificial Sequence
  Description of Artificial Sequence:  siNA antisense region
acccucacauggaaguuac

SEQ ID NO: 1182 - RNA, 19 nt, Artificial Sequence
  Description of Artificial Sequence:  siNA antisense region
caaauaucaaugcugaaaa

SEQ ID NO: 1183 - RNA, 19 nt, Artificial Sequence
  Description of Artificial Sequence:  siNA antisense region
cucuguuuagaaaaugcac

SEQ ID NO: 1184 - RNA, 19 nt, Artificial Sequence
  Description of Artificial Sequence:  siNA antisense region
gugaagauaccaccucauc

SEQ ID NO: 1185 - RNA, 19 nt, Artificial Sequence
  Description of Artificial Sequence:  siNA antisense region
cgaauaccaauguucuacg

SEQ ID NO: 1186 - RNA, 19 nt, Artificial Sequence
  Description of Artificial Sequence:  siNA antisense region
uauucuuuuuuucucaagc

SEQ ID NO: 1187 - RNA, 19 nt, Artificial Sequence
  Description of Artificial Sequence:  siNA antisense region
aagagaaauagguucaacu

SEQ ID NO: 1188 - RNA, 19 nt, Artificial Sequence
  Description of Artificial Sequence:  siNA antisense region
ggacccaucuuguaaagaa

SEQ ID NO: 1189 - RNA, 19 nt, Artificial Sequence
  Description of Artificial Sequence:  siNA antisense region
agagaaaagaggaauccug

SEQ ID NO: 1190 - RNA, 19 nt, Artificial Sequence
  Description of Artificial Sequence:  siNA antisense region
uaauuaaucauuuauggca

SEQ ID NO: 1191 - RNA, 19 nt, Artificial Sequence
  Description of Artificial Sequence:  siNA antisense region
uaagacacaaaagcuauuu

SEQ ID NO: 1192 - RNA, 19 nt, Artificial Sequence
  Description of Artificial Sequence:  siNA antisense region
gcuggcuggcuaccaaugu

SEQ ID NO: 1193 - RNA, 19 nt, Artificial Sequence
  Description of Artificial Sequence:  siNA antisense region
agcauaaacagagccuugg

SEQ ID NO: 1194 - RNA, 19 nt, Artificial Sequence
  Description of Artificial Sequence:  siNA antisense region
caauauaugccccccaaaa

SEQ ID NO: 1195 - RNA, 19 nt, Artificial Sequence
  Description of Artificial Sequence:  siNA antisense region
auaggugagaauggaaccc

SEQ ID NO: 1196 - RNA, 19 nt, Artificial Sequence
  Description of Artificial Sequence:  siNA antisense region
uacggauauguugugugga

SEQ ID NO: 1197 - RNA, 19 nt, Artificial Sequence
  Description of Artificial Sequence:  siNA antisense region
aagaguagaggggauauau

SEQ ID NO: 1198 - RNA, 19 nt, Artificial Sequence
  Description of Artificial Sequence:  siNA antisense region
uuuaaauuugggggaagua

SEQ ID NO: 1199 - RNA, 19 nt, Artificial Sequence
  Description of Artificial Sequence:  siNA antisense region
ucucauuucccauacuucu

SEQ ID NO: 1200 - RNA, 19 nt, Artificial Sequence
  Description of Artificial Sequence:  siNA antisense region
uggggugggggaaaugccu

SEQ ID NO: 1201 - RNA, 19 nt, Artificial Sequence
  Description of Artificial Sequence:  siNA antisense region
ugugugugaggagagaaau

SEQ ID NO: 1202 - RNA, 19 nt, Artificial Sequence
  Description of Artificial Sequence:  siNA antisense region
cuaccaguaauaugagucu

SEQ ID NO: 1203 - RNA, 19 nt, Artificial Sequence
  Description of Artificial Sequence:  siNA antisense region
aauaaaguucucaaguucc

SEQ ID NO: 1204 - RNA, 19 nt, Artificial Sequence
  Description of Artificial Sequence:  siNA antisense region
auguuugaacaacuuggaa

SEQ ID NO: 1205 - RNA, 19 nt, Artificial Sequence
  Description of Artificial Sequence:  siNA antisense region
uauuaauaugauugguaaa

SEQ ID NO: 1206 - RNA, 19 nt, Artificial Sequence
  Description of Artificial Sequence:  siNA antisense region
uugcaaauagcaucauugu

SEQ ID NO: 1207 - RNA, 19 nt, Artificial Sequence
  Description of Artificial Sequence:  siNA antisense region
cuccccuaggagcaggaau

SEQ ID NO: 1208 - RNA, 19 nt, Artificial Sequence
  Description of Artificial Sequence:  siNA antisense region
gaggguuucuuaucucccc

SEQ ID NO: 1209 - RNA, 19 nt, Artificial Sequence
  Description of Artificial Sequence:  siNA antisense region
cccaaaccuguagagagug

SEQ ID NO: 1210 - RNA, 19 nt, Artificial Sequence
  Description of Artificial Sequence:  siNA antisense region
agcagguugccacuuguac

SEQ ID NO: 1211 - RNA, 19 nt, Artificial Sequence
  Description of Artificial Sequence:  siNA antisense region
cuucuacacggccauggaa

SEQ ID NO: 1212 - RNA, 19 nt, Artificial Sequence
  Description of Artificial Sequence:  siNA antisense region
agaagccagggcaccaugc

SEQ ID NO: 1213 - RNA, 19 nt, Artificial Sequence
  Description of Artificial Sequence:  siNA antisense region
gaaccccagcuuccucaga

SEQ ID NO: 1214 - RNA, 19 nt, Artificial Sequence
  Description of Artificial Sequence:  siNA antisense region
uacaucugccauugucaug

SEQ ID NO: 1215 - RNA, 19 nt, Artificial Sequence
  Description of Artificial Sequence:  siNA antisense region
ugacuucaagaauaacuuu

SEQ ID NO: 1216 - RNA, 19 nt, Artificial Sequence
  Description of Artificial Sequence:  siNA antisense region
ugucucccagccucaaucu

SEQ ID NO: 1217 - RNA, 19 nt, Artificial Sequence
  Description of Artificial Sequence:  siNA antisense region
uagaacaucuacuacggcu

SEQ ID NO: 1218 - RNA, 19 nt, Artificial Sequence
  Description of Artificial Sequence:  siNA antisense region
gagaacagcagaacaaagu

SEQ ID NO: 1219 - RNA, 19 nt, Artificial Sequence
  Description of Artificial Sequence:  siNA antisense region
aaccaaauauucuuucuag

SEQ ID NO: 1220 - RNA, 19 nt, Artificial Sequence
  Description of Artificial Sequence:  siNA antisense region
cucauuccuauacaggaaa

SEQ ID NO: 1221 - RNA, 19 nt, Artificial Sequence
  Description of Artificial Sequence:  siNA antisense region
accuggaaaggaauuaauc

SEQ ID NO: 1222 - RNA, 19 nt, Artificial Sequence
  Description of Artificial Sequence:  siNA antisense region
uucccagaauuauaaaaua

SEQ ID NO: 1223 - RNA, 19 nt, Artificial Sequence
  Description of Artificial Sequence:  siNA antisense region
gggaggcauggguuuugcu

SEQ ID NO: 1224 - RNA, 19 nt, Artificial Sequence
  Description of Artificial Sequence:  siNA antisense region
acaguaaaaauggcuaggg

SEQ ID NO: 1225 - RNA, 19 nt, Artificial Sequence
  Description of Artificial Sequence:  siNA antisense region
ggccaucuaaauaggauaa

SEQ ID NO: 1226 - RNA, 19 nt, Artificial Sequence
  Description of Artificial Sequence:  siNA antisense region
ucacagcauccucuucaug

SEQ ID NO: 1227 - RNA, 19 nt, Artificial Sequence
  Description of Artificial Sequence:  siNA antisense region
caauguuuguugggaauuu

SEQ ID NO: 1228 - RNA, 19 nt, Artificial Sequence
  Description of Artificial Sequence:  siNA antisense region
cugcaugacugucagcauc

SEQ ID NO: 1229 - RNA, 19 nt, Artificial Sequence
  Description of Artificial Sequence:  siNA antisense region
cacuuccccacucccagac

SEQ ID NO: 1230 - RNA, 19 nt, Artificial Sequence
  Description of Artificial Sequence:  siNA antisense region
aggaugggaacaaaagauc

SEQ ID NO: 1231 - RNA, 19 nt, Artificial Sequence
  Description of Artificial Sequence:  siNA antisense region
uuuuacugcuaaaagaaga

SEQ ID NO: 1232 - RNA, 19 nt, Artificial Sequence
  Description of Artificial Sequence:  siNA antisense region
ucccuuuucccucagcuau

SEQ ID NO: 1233 - RNA, 19 nt, Artificial Sequence
  Description of Artificial Sequence:  siNA antisense region
ccauaacuuccuuuucccu

SEQ ID NO: 1234 - RNA, 19 nt, Artificial Sequence
  Description of Artificial Sequence:  siNA antisense region
caaccaccacagguauucc

SEQ ID NO: 1235 - RNA, 19 nt, Artificial Sequence
  Description of Artificial Sequence:  siNA antisense region
cccaagaccuagggaucac

SEQ ID NO: 1236 - RNA, 19 nt, Artificial Sequence
  Description of Artificial Sequence:  siNA antisense region
cagacaccuccaagagcuc

SEQ ID NO: 1237 - RNA, 19 nt, Artificial Sequence
  Description of Artificial Sequence:  siNA antisense region
augggaaauccacugauac

SEQ ID NO: 1238 - RNA, 19 nt, Artificial Sequence
  Description of Artificial Sequence:  siNA antisense region
acuaauuucccacagggga

SEQ ID NO: 1239 - RNA, 19 nt, Artificial Sequence
  Description of Artificial Sequence:  siNA antisense region
aaaacaguaaaugagccua

SEQ ID NO: 1240 - RNA, 19 nt, Artificial Sequence
  Description of Artificial Sequence:  siNA antisense region
uccacauaggcuagaccua

SEQ ID NO: 1241 - RNA, 19 nt, Artificial Sequence
  Description of Artificial Sequence:  siNA antisense region
agguauguuaggaaaaaau

SEQ ID NO: 1242 - RNA, 19 nt, Artificial Sequence
  Description of Artificial Sequence:  siNA antisense region
cugacacuggguuugcuua

SEQ ID NO: 1243 - RNA, 19 nt, Artificial Sequence
  Description of Artificial Sequence:  siNA antisense region
agaauaagaauuaccaucc

SEQ ID NO: 1244 - RNA, 19 nt, Artificial Sequence
  Description of Artificial Sequence:  siNA antisense region
aaaacuuaacugaacgaaa

SEQ ID NO: 1245 - RNA, 19 nt, Artificial Sequence
  Description of Artificial Sequence:  siNA antisense region
agugcccagaugaagggaa

SEQ ID NO: 1246 - RNA, 19 nt, Artificial Sequence
  Description of Artificial Sequence:  siNA antisense region
uguuucacauaucccuuca

SEQ ID NO: 1247 - RNA, 19 nt, Artificial Sequence
  Description of Artificial Sequence:  siNA antisense region
uaccaaaaauguuaacauu

SEQ ID NO: 1248 - RNA, 19 nt, Artificial Sequence
  Description of Artificial Sequence:  siNA antisense region
caaucccugguugaagacu

SEQ ID NO: 1249 - RNA, 19 nt, Artificial Sequence
  Description of Artificial Sequence:  siNA antisense region
uaagaaguuaaacagaaac

SEQ ID NO: 1250 - RNA, 19 nt, Artificial Sequence
  Description of Artificial Sequence:  siNA antisense region
uuuacucaagcuuuccuau

SEQ ID NO: 1251 - RNA, 19 nt, Artificial Sequence
  Description of Artificial Sequence:  siNA antisense region
caaaaagacaauauuuauu

SEQ ID NO: 1252 - RNA, 19 nt, Artificial Sequence
  Description of Artificial Sequence:  siNA antisense region
acauacaaaaagacaauau

SEQ ID NO: 1253 - RNA, 23 nt, Artificial Sequence
  Description of Artificial Sequence:  Target Sequence/siNA sense region
acaccacagcugauuucuuccug

SEQ ID NO: 1254 - RNA, 23 nt, Artificial Sequence
  Description of Artificial Sequence:  Target Sequence/siNA sense region
auuucuuccugaccacuaugccc

SEQ ID NO: 1255 - RNA, 23 nt, Artificial Sequence
  Description of Artificial Sequence:  Target Sequence/siNA sense region
cugaccacuaugcccacugacuc

SEQ ID NO: 1256 - RNA, 23 nt, Artificial Sequence
  Description of Artificial Sequence:  Target Sequence/siNA sense region
ugacucccucaguguuuccacuc

SEQ ID NO: 1257 - RNA, 23 nt, Artificial Sequence
  Description of Artificial Sequence:  Target Sequence/siNA sense region
ccaaccucacucugcauuauugg

SEQ ID NO: 1258 - RNA, 23 nt, Artificial Sequence
  Description of Artificial Sequence:  Target Sequence/siNA sense region
ugauaaaguccagaagugcagcc

SEQ ID NO: 1259 - RNA, 23 nt, Artificial Sequence
  Description of Artificial Sequence:  Target Sequence/siNA sense region
gauaaaguccagaagugcagcca

SEQ ID NO: 1260 - RNA, 23 nt, Artificial Sequence
  Description of Artificial Sequence:  Target Sequence/siNA sense region
aaucacuucuggcugucaguugc

SEQ ID NO: 1261 - RNA, 3 nt, Artificial Sequence
  Description of Artificial Sequence:  Target Sequence/siNA sense region
aaa

SEQ ID NO: 1262 - RNA, 3 nt, Artificial Sequence
  Description of Artificial Sequence:  Target Sequence/siNA sense region
aaa

SEQ ID NO: 1263 - RNA, 3 nt, Artificial Sequence
  Description of Artificial Sequence:  Target Sequence/siNA sense region
aaa

SEQ ID NO: 1264 - RNA, 3 nt, Artificial Sequence
  Description of Artificial Sequence:  Target Sequence/siNA sense region
aaa

SEQ ID NO: 1265 - RNA, 3 nt, Artificial Sequence
  Description of Artificial Sequence:  Target Sequence/siNA sense region
aaa

SEQ ID NO: 1266 - RNA, 3 nt, Artificial Sequence
  Description of Artificial Sequence:  Target Sequence/siNA sense region
aaa

SEQ ID NO: 1267 - RNA, 3 nt, Artificial Sequence
  Description of Artificial Sequence:  Target Sequence/siNA sense region
aaa

SEQ ID NO: 1268 - RNA, 3 nt, Artificial Sequence
  Description of Artificial Sequence:  Target Sequence/siNA sense region
aaa

SEQ ID NO: 1269 - RNA, 23 nt, Artificial Sequence
  Description of Artificial Sequence:  Target Sequence/siNA sense region
cagccucacagagcagaagacuc

SEQ ID NO: 1270 - RNA, 23 nt, Artificial Sequence
  Description of Artificial Sequence:  Target Sequence/siNA sense region
gccucacagagcagaagacucug

SEQ ID NO: 1271 - RNA, 23 nt, Artificial Sequence
  Description of Artificial Sequence:  Target Sequence/siNA sense region
ccgaguugaccguaacagacauc

SEQ ID NO: 1272 - RNA, 23 nt, Artificial Sequence
  Description of Artificial Sequence:  Target Sequence/siNA sense region
cguaacagacaucuuugcugccu

SEQ ID NO: 1273 - RNA, 23 nt, Artificial Sequence
  Description of Artificial Sequence:  Target Sequence/siNA sense region
gccuccaagaacacaacugagaa

SEQ ID NO: 1274 - RNA, 23 nt, Artificial Sequence
  Description of Artificial Sequence:  Target Sequence/siNA sense region
ucuacagccaccaugagaaggac

SEQ ID NO: 1275 - RNA, 23 nt, Artificial Sequence
  Description of Artificial Sequence:  Target Sequence/siNA sense region
uugaauuccuguccugugaagga

SEQ ID NO: 1276 - RNA, 23 nt, Artificial Sequence
  Description of Artificial Sequence:  Target Sequence/siNA sense region
gaaggaagccaaccagaguacgu

SEQ ID NO: 1277 - RNA, 23 nt, Artificial Sequence
  Description of Artificial Sequence:  Target Sequence/siNA sense region
cuauacacuggaccugugggcug

SEQ ID NO: 1278 - RNA, 23 nt, Artificial Sequence
  Description of Artificial Sequence:  Target Sequence/siNA sense region
ccaggaaaccugacaguucacac

SEQ ID NO: 1279 - RNA, 23 nt, Artificial Sequence
  Description of Artificial Sequence:  Target Sequence/siNA sense region
agcacaacaugaaaagggaugaa

SEQ ID NO: 1280 - RNA, 23 nt, Artificial Sequence
  Description of Artificial Sequence:  Target Sequence/siNA sense region
gcacaacaugaaaagggaugaag

SEQ ID NO: 1281 - RNA, 23 nt, Artificial Sequence
  Description of Artificial Sequence:  Target Sequence/siNA sense region
aagggaugaagauccucacaagg

SEQ ID NO: 1282 - RNA, 23 nt, Artificial Sequence
  Description of Artificial Sequence:  Target Sequence/siNA sense region
uugggaaaucgaugagaaauuga

SEQ ID NO: 1283 - RNA, 23 nt, Artificial Sequence
  Description of Artificial Sequence:  Target Sequence/siNA sense region
ugggaaaucgaugagaaauugaa

SEQ ID NO: 1284 - RNA, 23 nt, Artificial Sequence
  Description of Artificial Sequence:  Target Sequence/siNA sense region
ucauugccuagaggugcucauuc

SEQ ID NO: 1285 - RNA, 23 nt, Artificial Sequence
  Description of Artificial Sequence:  Target Sequence/siNA sense region
cccaguuuguaaaggaccugcuc

SEQ ID NO: 1286 - RNA, 23 nt, Artificial Sequence
  Description of Artificial Sequence:  Target Sequence/siNA sense region
cacuucacacacaggcaacugag

SEQ ID NO: 1287 - RNA, 23 nt, Artificial Sequence
  Description of Artificial Sequence:  Target Sequence/siNA sense region
ucaggcacacuucuucuuggucu

SEQ ID NO: 1288 - RNA, 23 nt, Artificial Sequence
  Description of Artificial Sequence:  Target Sequence/siNA sense region
aagacuguggcugcuagcacuug

SEQ ID NO: 1289 - RNA, 23 nt, Artificial Sequence
  Description of Artificial Sequence:  Target Sequence/siNA sense region
agcacuaaagcaguggacaccag

SEQ ID NO: 1290 - RNA, 23 nt, Artificial Sequence
  Description of Artificial Sequence:  Target Sequence/siNA sense region
cacuaaagcaguggacaccagga

SEQ ID NO: 1291 - RNA, 23 nt, Artificial Sequence
  Description of Artificial Sequence:  Target Sequence/siNA sense region
uaaagcaguggacaccaggaguc

SEQ ID NO: 1292 - RNA, 23 nt, Artificial Sequence
  Description of Artificial Sequence:  Target Sequence/siNA sense region
agaaggguaccuugaacacuggg

SEQ ID NO: 1293 - RNA, 23 nt, Artificial Sequence
  Description of Artificial Sequence:  Target Sequence/siNA sense region
uauuguguguuauuuaaaugagu

SEQ ID NO: 1294 - RNA, 23 nt, Artificial Sequence
  Description of Artificial Sequence:  Target Sequence/siNA sense region
auuguguguuauuuaaaugagug

SEQ ID NO: 1295 - RNA, 23 nt, Artificial Sequence
  Description of Artificial Sequence:  Target Sequence/siNA sense region
uuguguguuauuuaaaugagugu

SEQ ID NO: 1296 - RNA, 23 nt, Artificial Sequence
  Description of Artificial Sequence:  Target Sequence/siNA sense region
uuauuguguguuauuuaaaugag

SEQ ID NO: 1297 - RNA, 23 nt, Artificial Sequence
  Description of Artificial Sequence:  Target Sequence/siNA sense region
ugcaauggcagcaugguauggag

SEQ ID NO: 1298 - RNA, 23 nt, Artificial Sequence
  Description of Artificial Sequence:  Target Sequence/siNA sense region
gcaauggcagcaugguauggagc

SEQ ID NO: 1299 - RNA, 23 nt, Artificial Sequence
  Description of Artificial Sequence:  Target Sequence/siNA sense region
caauggcagcaugguauggagca

SEQ ID NO: 1300 - RNA, 23 nt, Artificial Sequence
  Description of Artificial Sequence:  Target Sequence/siNA sense region
uuauuauuguguguuauuuaaau

SEQ ID NO: 1301 - RNA, 23 nt, Artificial Sequence
  Description of Artificial Sequence:  Target Sequence/siNA sense region
uauuauuguguguuauuuaaaug

SEQ ID NO: 1302 - RNA, 23 nt, Artificial Sequence
  Description of Artificial Sequence:  Target Sequence/siNA sense region
auuauuguguguuauuuaaauga

SEQ ID NO: 1303 - RNA, 23 nt, Artificial Sequence
  Description of Artificial Sequence:  Target Sequence/siNA sense region
aaggugauccugagucugcugug

SEQ ID NO: 1304 - RNA, 23 nt, Artificial Sequence
  Description of Artificial Sequence:  Target Sequence/siNA sense region
uggucaaggauaaugcaggaaaa

SEQ ID NO: 1305 - RNA, 23 nt, Artificial Sequence
  Description of Artificial Sequence:  Target Sequence/siNA sense region
cguccaagaggcuaaaugugaga

SEQ ID NO: 1306 - RNA, 23 nt, Artificial Sequence
  Description of Artificial Sequence:  Target Sequence/siNA sense region
ggaaaccgacucuguagugcuga

SEQ ID NO: 1307 - RNA, 23 nt, Artificial Sequence
  Description of Artificial Sequence:  Target Sequence/siNA sense region
ugaagaaagccucucagugaugg

SEQ ID NO: 1308 - RNA, 23 nt, Artificial Sequence
  Description of Artificial Sequence:  Target Sequence/siNA sense region
acugcaccauuuaaaaacaggca

SEQ ID NO: 1309 - RNA, 23 nt, Artificial Sequence
  Description of Artificial Sequence:  Target Sequence/siNA sense region
cagcauuuuccucugcuuugaaa

SEQ ID NO: 1310 - RNA, 23 nt, Artificial Sequence
  Description of Artificial Sequence:  Target Sequence/siNA sense region
ccaagaccuuucaaagccauuuu

SEQ ID NO: 1311 - RNA, 21 nt, Artificial Sequence
  Description of Artificial Sequence:  siNA sense region
  misc_feature (20)..(21): n stands for thymidine
accacagcugauuucuuccnn

SEQ ID NO: 1312 - RNA, 21 nt, Artificial Sequence
  Description of Artificial Sequence:  siNA sense region
  misc_feature (20)..(21): n stands for thymidine
uucuuccugaccacuaugcnn

SEQ ID NO: 1313 - RNA, 21 nt, Artificial Sequence
  Description of Artificial Sequence:  siNA sense region
  misc_feature (20)..(21): n stands for thymidine
gaccacuaugcccacugacnn

SEQ ID NO: 1314 - RNA, 21 nt, Artificial Sequence
  Description of Artificial Sequence:  siNA sense region
  misc_feature (20)..(21): n stands for thymidine
acucccucaguguuuccacnn

SEQ ID NO: 1315 - RNA, 21 nt, Artificial Sequence
  Description of Artificial Sequence:  siNA sense region
  misc_feature (20)..(21): n stands for thymidine
aaccucacucugcauuauunn

SEQ ID NO: 1316 - RNA, 21 nt, Artificial Sequence
  Description of Artificial Sequence:  siNA sense region
  misc_feature (20)..(21): n stands for thymidine
auaaaguccagaagugcagnn

SEQ ID NO: 1317 - RNA, 21 nt, Artificial Sequence
  Description of Artificial Sequence:  siNA sense region
  misc_feature (20)..(21): n stands for thymidine
uaaaguccagaagugcagcnn

SEQ ID NO: 1318 - RNA, 21 nt, Artificial Sequence
  Description of Artificial Sequence:  siNA sense region
  misc_feature (20)..(21): n stands for thymidine
ucacuucuggcugucaguunn

SEQ ID NO: 1319 - RNA, 21 nt, Artificial Sequence
  Description of Artificial Sequence:  siNA antisense region
  misc_feature (20)..(21): n stands for thymidine
ggaagaaaucagcuguggunn

SEQ ID NO: 1320 - RNA, 21 nt, Artificial Sequence
  Description of Artificial Sequence:  siNA antisense region
  misc_feature (20)..(21): n stands for thymidine
gcauaguggucaggaagaann

SEQ ID NO: 1321 - RNA, 21 nt, Artificial Sequence
  Description of Artificial Sequence:  siNA antisense region
  misc_feature (20)..(21): n stands for thymidine
gucagugggcauaguggucnn

SEQ ID NO: 1322 - RNA, 21 nt, Artificial Sequence
  Description of Artificial Sequence:  siNA antisense region
  misc_feature (20)..(21): n stands for thymidine
guggaaacacugagggagunn

SEQ ID NO: 1323 - RNA, 21 nt, Artificial Sequence
  Description of Artificial Sequence:  siNA antisense region
  misc_feature (20)..(21): n stands for thymidine
aauaaugcagagugagguunn

SEQ ID NO: 1324 - RNA, 21 nt, Artificial Sequence
  Description of Artificial Sequence:  siNA antisense region
  misc_feature (20)..(21): n stands for thymidine
cugcacuucuggacuuuaunn

SEQ ID NO: 1325 - RNA, 21 nt, Artificial Sequence
  Description of Artificial Sequence:  siNA antisense region
  misc_feature (20)..(21): n stands for thymidine
gcugcacuucuggacuuuann

SEQ ID NO: 1326 - RNA, 21 nt, Artificial Sequence
  Description of Artificial Sequence:  siNA antisense region
  misc_feature (20)..(21): n stands for thymidine
aacugacagccagaagugann

SEQ ID NO: 1327 - RNA, 21 nt, Artificial Sequence
  Description of Artificial Sequence:  siNA sense region
  misc_feature (1)..(1): 5'-3 attached terminal deoxyabasic moeity
  misc_feature (2)..(3): 2'-deoxy-2'-fluoro
  misc_feature (5)..(5): 2'-deoxy-2'-fluoro
  misc_feature (8)..(9): 2'-deoxy-2'-fluoro
  misc_feature (12)..(19): 2'-deoxy-2'-fluoro
  misc_feature (20)..(20): n stands for thymidine
  misc_feature (21)..(21): 3'-3 attached terminal deoxyabasic moeity
accacagcugauuucuuccnn

SEQ ID NO: 1328 - RNA, 21 nt, Artificial Sequence
  Description of Artificial Sequence:  siNA sense region
  misc_feature (1)..(1): 5'-3 attached terminal deoxyabasic moeity
  misc_feature (1)..(8): 2'-deoxy-2'-fluoro
  misc_feature (11)..(12): 2'-deoxy-2'-fluoro
  misc_feature (14)..(15): 2'-deoxy-2'-fluoro
  misc_feature (17)..(17): 2'-deoxy-2'-fluoro
  misc_feature (19)..(19): 2'-deoxy-2'-fluoro
  misc_feature (20)..(20): n stands for thymidine
  misc_feature (21)..(21): 3'-3 attached terminal deoxyabasic moeity
uucuuccugaccacuaugcnn

SEQ ID NO: 1329 - RNA, 21 nt, Artificial Sequence
  Description of Artificial Sequence:  siNA sense region
  misc_feature (1)..(1): 5'-3 attached terminal deoxyabasic moeity
  misc_feature (3)..(4): 2'-deoxy-2'-fluoro
  misc_feature (6)..(7): 2'-deoxy-2'-fluoro
  misc_feature (9)..(9): 2'-deoxy-2'-fluoro
  misc_feature (11)..(13): 2'-deoxy-2'-fluoro
  misc_feature (15)..(16): 2'-deoxy-2'-fluoro
  misc_feature (19)..(19): 2'-deoxy-2'-fluoro
  misc_feature (20)..(20): n stands for thymidine
  misc_feature (21)..(21): 3'-3 attached terminal deoxyabasic moeity
gaccacuaugcccacugacnn

SEQ ID NO: 1330 - RNA, 21 nt, Artificial Sequence
  Description of Artificial Sequence:  siNA sense region
  misc_feature (1)..(1): 5'-3 attached terminal deoxyabasic moeity
  misc_feature (2)..(8): 2'-deoxy-2'-fluoro
  misc_feature (11)..(11): 2'-deoxy-2'-fluoro
  misc_feature (13)..(17): 2'-deoxy-2'-fluoro
  misc_feature (19)..(19): 2'-deoxy-2'-fluoro
  misc_feature (20)..(20): n stands for thymidine
  misc_feature (21)..(21): 3'-3 attached terminal deoxyabasic moeity
acucccucaguguuuccacnn

SEQ ID NO: 1331 - RNA, 21 nt, Artificial Sequence
  Description of Artificial Sequence:  siNA sense region
  misc_feature (1)..(1): 5'-3 attached terminal deoxyabasic moeity
  misc_feature (3)..(6): 2'-deoxy-2'-fluoro
  misc_feature (8)..(11): 2'-deoxy-2'-fluoro
  misc_feature (13)..(13): 2'-deoxy-2'-fluoro
  misc_feature (15)..(16): 2'-deoxy-2'-fluoro
  misc_feature (18)..(19): 2'-deoxy-2'-fluoro
  misc_feature (20)..(20): n stands for thymidine
  misc_feature (21)..(21): 3'-3 attached terminal deoxyabasic moeity
aaccucacucugcauuauunn

SEQ ID NO: 1332 - RNA, 21 nt, Artificial Sequence
  Description of Artificial Sequence:  siNA sense region
  misc_feature (1)..(1): 5'-3 attached terminal deoxyabasic moeity
  misc_feature (2)..(2): 2'-deoxy-2'-fluoro
  misc_feature (7)..(9): 2'-deoxy-2'-fluoro
  misc_feature (15)..(15): 2'-deoxy-2'-fluoro
  misc_feature (17)..(17): 2'-deoxy-2'-fluoro
  misc_feature (20)..(20): n stands for thymidine
  misc_feature (21)..(21): 3'-3 attached terminal deoxyabasic moeity
auaaaguccagaagugcagnn

SEQ ID NO: 1333 - RNA, 21 nt, Artificial Sequence
  Description of Artificial Sequence:  siNA sense region
  misc_feature (1)..(1): 5'-3 attached terminal deoxyabasic moeity
  misc_feature (1)..(1): 2'-deoxy-2'-fluoro
  misc_feature (6)..(8): 2'-deoxy-2'-fluoro
  misc_feature (14)..(14): 2'-deoxy-2'-fluoro
  misc_feature (16)..(16): 2'-deoxy-2'-fluoro
  misc_feature (19)..(19): 2'-deoxy-2'-fluoro
  misc_feature (20)..(20): n stands for thymidine
  misc_feature (21)..(21): 3'-3 attached terminal deoxyabasic moeity
uaaaguccagaagugcagcnn

SEQ ID NO: 1334 - RNA, 21 nt, Artificial Sequence
  Description of Artificial Sequence:  siNA sense region
  misc_feature (1)..(1): 5'-3 attached terminal deoxyabasic moeity
  misc_feature (1)..(2): 2'-deoxy-2'-fluoro
  misc_feature (4)..(8): 2'-deoxy-2'-fluoro
  misc_feature (11)..(12): 2'-deoxy-2'-fluoro
  misc_feature (14)..(15): 2'-deoxy-2'-fluoro
  misc_feature (18)..(19): 2'-deoxy-2'-fluoro
  misc_feature (20)..(20): n stands for thymidine
  misc_feature (21)..(21): 3'-3 attached terminal deoxyabasic moeity
ucacuucuggcugucaguunn

SEQ ID NO: 1335 - RNA, 21 nt, Artificial Sequence
  Description of Artificial Sequence:  siNA antisense region
  misc_feature (9)..(10): 2'-deoxy-2'-fluoro
  misc_feature (13)..(14): 2'-deoxy-2'-fluoro
  misc_feature (16)..(16): 2'-deoxy-2'-fluoro
  misc_feature (19)..(19): 2'-deoxy-2'-fluoro
  misc_feature (20)..(20): Phosphorothioate 3'-Internucleotide Linkage
  misc_feature (21)..(21): n stands for thymidine
ggaagaaaucagcuguggunn

SEQ ID NO: 1336 - RNA, 21 nt, Artificial Sequence
  Description of Artificial Sequence:  siNA antisense region
  misc_feature (2)..(2): 2'-deoxy-2'-fluoro
  misc_feature (4)..(4): 2'-deoxy-2'-fluoro
  misc_feature (7)..(7): 2'-deoxy-2'-fluoro
  misc_feature (10)..(11): 2'-deoxy-2'-fluoro
  misc_feature (20)..(20): Phosphorothioate 3'-Internucleotide Linkage
  misc_feature (21)..(21): n stands for thymidine
gcauaguggucaggaagaann

SEQ ID NO: 1337 - RNA, 21 nt, Artificial Sequence
  Description of Artificial Sequence:  siNA antisense region
  misc_feature (2)..(3): 2'-deoxy-2'-fluoro
  misc_feature (6)..(6): 2'-deoxy-2'-fluoro
  misc_feature (10)..(10): 2'-deoxy-2'-fluoro
  misc_feature (12)..(12): 2'-deoxy-2'-fluoro
  misc_feature (15)..(15): 2'-deoxy-2'-fluoro
  misc_feature (18)..(19): 2'-deoxy-2'-fluoro
  misc_feature (20)..(20): Phosphorothioate 3'-Internucleotide Linkage
  misc_feature (21)..(21): n stands for thymidine
gucagugggcauaguggucnn

SEQ ID NO: 1338 - RNA, 21 nt, Artificial Sequence
  Description of Artificial Sequence:  siNA antisense region
  misc_feature (2)..(2): 2'-deoxy-2'-fluoro
  misc_feature (8)..(8): 2'-deoxy-2'-fluoro
  misc_feature (10)..(11): 2'-deoxy-2'-fluoro
  misc_feature (19)..(19): 2'-deoxy-2'-fluoro
  misc_feature (20)..(20): Phosphorothioate 3'-Internucleotide Linkage
  misc_feature (21)..(21): n stands for thymidine
guggaaacacugagggagunn

SEQ ID NO: 1339 - RNA, 21 nt, Artificial Sequence
  Description of Artificial Sequence:  siNA antisense region
  misc_feature (3)..(3): 2'-deoxy-2'-fluoro
  misc_feature (6)..(6): 2'-deoxy-2'-fluoro
  misc_feature (8)..(8): 2'-deoxy-2'-fluoro
  misc_feature (13)..(13): 2'-deoxy-2'-fluoro
  misc_feature (18)..(19): 2'-deoxy-2'-fluoro
  misc_feature (20)..(20): Phosphorothioate 3'-Internucleotide Linkage
  misc_feature (21)..(21): n stands for thymidine
aauaaugcagagugagguunn

SEQ ID NO: 1340 - RNA, 21 nt, Artificial Sequence
  Description of Artificial Sequence:  siNA antisense region
  misc_feature (1)..(2): 2'-deoxy-2'-fluoro
  misc_feature (4)..(4): 2'-deoxy-2'-fluoro
  misc_feature (6)..(10): 2'-deoxy-2'-fluoro
  misc_feature (14)..(17): 2'-deoxy-2'-fluoro
  misc_feature (19)..(19): 2'-deoxy-2'-fluoro
  misc_feature (20)..(20): Phosphorothioate 3'-Internucleotide Linkage
  misc_feature (21)..(21): n stands for thymidine
cugcacuucuggacuuuaunn

SEQ ID NO: 1341 - RNA, 21 nt, Artificial Sequence
  Description of Artificial Sequence:  siNA antisense region
  misc_feature (2)..(3): 2'-deoxy-2'-fluoro
  misc_feature (5)..(5): 2'-deoxy-2'-fluoro
  misc_feature (7)..(11): 2'-deoxy-2'-fluoro
  misc_feature (15)..(18): 2'-deoxy-2'-fluoro
  misc_feature (20)..(20): Phosphorothioate 3'-Internucleotide Linkage
  misc_feature (21)..(21): n stands for thymidine
gcugcacuucuggacuuuann

SEQ ID NO: 1342 - RNA, 21 nt, Artificial Sequence
  Description of Artificial Sequence:  siNA antisense region
  misc_feature (3)..(4): 2'-deoxy-2'-fluoro
  misc_feature (7)..(7): 2'-deoxy-2'-fluoro
  misc_feature (10)..(11): 2'-deoxy-2'-fluoro
  misc_feature (17)..(17): 2'-deoxy-2'-fluoro
  misc_feature (20)..(20): Phosphorothioate 3'-Internucleotide Linkage
  misc_feature (21)..(21): n stands for thymidine
aacugacagccagaagugann

SEQ ID NO: 1343 - RNA, 21 nt, Artificial Sequence
  Description of Artificial Sequence:  siNA sense region
  misc_feature (1)..(1): 5'-3 attached terminal deoxyabasic moeity
  misc_feature (1)..(1): 2'-deoxy
  misc_feature (2)..(3): 2'-deoxy-2'-fluoro
  misc_feature (4)..(4): 2'-deoxy
  misc_feature (5)..(5): 2'-deoxy-2'-fluoro
  misc_feature (6)..(7): 2'-deoxy
  misc_feature (8)..(9): 2'-deoxy-2'-fluoro
  misc_feature (10)..(11): 2'-deoxy
  misc_feature (12)..(19): 2'-deoxy-2'-fluoro
  misc_feature (20)..(20): n stands for thymidine
  misc_feature (21)..(21): 3'-3 attached terminal deoxyabasic moeity
accacagcugauuucuuccnn

SEQ ID NO: 1344 - RNA, 21 nt, Artificial Sequence
  Description of Artificial Sequence:  siNA sense region
  misc_feature (1)..(1): 5'-3 attached terminal deoxyabasic moeity
  misc_feature (1)..(8): 2'-deoxy-2'-fluoro
  misc_feature (9)..(10): 2'-deoxy
  misc_feature (11)..(12): 2'-deoxy-2'-fluoro
  misc_feature (13)..(13): 2'-deoxy
  misc_feature (14)..(15): 2'-deoxy-2'-fluoro
  misc_feature (16)..(16): 2'-deoxy
  misc_feature (17)..(17): 2'-deoxy-2'-fluoro
  misc_feature (18)..(18): 2'-deoxy
  misc_feature (19)..(19): 2'-deoxy-2'-fluoro
  misc_feature (20)..(20): n stands for thymidine
  misc_feature (21)..(21): 3'-3 attached terminal deoxyabasic moeity
uucuuccugaccacuaugcnn

SEQ ID NO: 1345 - RNA, 21 nt, Artificial Sequence
  Description of Artificial Sequence:  siNA sense region
  misc_feature (1)..(1): 5'-3 attached terminal deoxyabasic moeity
  misc_feature (1)..(2): 2'-deoxy
  misc_feature (3)..(4): 2'-deoxy-2'-fluoro
  misc_feature (5)..(5): 2'-deoxy
  misc_feature (6)..(7): 2'-deoxy-2'-fluoro
  misc_feature (8)..(8): 2'-deoxy
  misc_feature (9)..(9): 2'-deoxy-2'-fluoro
  misc_feature (10)..(10): 2'-deoxy
  misc_feature (11)..(13): 2'-deoxy-2'-fluoro
  misc_feature (14)..(14): 2'-deoxy
  misc_feature (15)..(16): 2'-deoxy-2'-fluoro
  misc_feature (17)..(18): 2'-deoxy
  misc_feature (19)..(19): 2'-deoxy-2'-fluoro
  misc_feature (20)..(20): n stands for thymidine
  misc_feature (21)..(21): 3'-3 attached terminal deoxyabasic moeity
gaccacuaugcccacugacnn

SEQ ID NO: 1346 - RNA, 21 nt, Artificial Sequence
  Description of Artificial Sequence:  siNA sense region
  misc_feature (1)..(1): 5'-3 attached terminal deoxyabasic moeity
  misc_feature (1)..(1): 2'-deoxy
  misc_feature (2)..(8): 2'-deoxy-2'-fluoro
  misc_feature (9)..(10): 2'-deoxy
  misc_feature (11)..(11): 2'-deoxy-2'-fluoro
  misc_feature (12)..(12): 2'-deoxy
  misc_feature (13)..(17): 2'-deoxy-2'-fluoro
  misc_feature (18)..(18): 2'-deoxy
  misc_feature (19)..(19): 2'-deoxy-2'-fluoro
  misc_feature (20)..(20): n stands for thymidine
  misc_feature (21)..(21): 3'-3 attached terminal deoxyabasic moeity
acucccucaguguuuccacnn

SEQ ID NO: 1347 - RNA, 21 nt, Artificial Sequence
  Description of Artificial Sequence:  siNA sense region
  misc_feature (1)..(1): 5'-3 attached terminal deoxyabasic moeity
  misc_feature (1)..(2): 2'-deoxy
  misc_feature (3)..(6): 2'-deoxy-2'-fluoro
  misc_feature (7)..(7): 2'-deoxy
  misc_feature (8)..(11): 2'-deoxy-2'-fluoro
  misc_feature (12)..(12): 2'-deoxy
  misc_feature (13)..(13): 2'-deoxy-2'-fluoro
  misc_feature (14)..(14): 2'-deoxy
  misc_feature (15)..(16): 2'-deoxy-2'-fluoro
  misc_feature (17)..(17): 2'-deoxy
  misc_feature (18)..(19): 2'-deoxy-2'-fluoro
  misc_feature (20)..(20): n stands for thymidine
  misc_feature (21)..(21): 3'-3 attached terminal deoxyabasic moeity
aaccucacucugcauuauunn

SEQ ID NO: 1348 - RNA, 21 nt, Artificial Sequence
  Description of Artificial Sequence:  siNA sense region
  misc_feature (1)..(1): 5'-3 attached terminal deoxyabasic moeity
  misc_feature (1)..(1): 2'-deoxy
  misc_feature (2)..(2): 2'-deoxy-2'-fluoro
  misc_feature (3)..(6): 2'-deoxy
  misc_feature (7)..(9): 2'-deoxy-2'-fluoro
  misc_feature (10)..(14): 2'-deoxy
  misc_feature (15)..(15): 2'-deoxy-2'-fluoro
  misc_feature (16)..(16): 2'-deoxy
  misc_feature (17)..(17): 2'-deoxy-2'-fluoro
  misc_feature (18)..(19): 2'-deoxy
  misc_feature (20)..(20): n stands for thymidine
  misc_feature (21)..(21): 3'-3 attached terminal deoxyabasic moeity
auaaaguccagaagugcagnn

SEQ ID NO: 1349 - RNA, 21 nt, Artificial Sequence
  Description of Artificial Sequence:  siNA sense region
  misc_feature (1)..(1): 5'-3 attached terminal deoxyabasic moeity
  misc_feature (1)..(1): 2'-deoxy-2'-fluoro
  misc_feature (2)..(5): 2'-deoxy
  misc_feature (6)..(8): 2'-deoxy-2'-fluoro
  misc_feature (9)..(13): 2'-deoxy
  misc_feature (14)..(14): 2'-deoxy-2'-fluoro
  misc_feature (15)..(15): 2'-deoxy
  misc_feature (16)..(16): 2'-deoxy-2'-fluoro
  misc_feature (17)..(18): 2'-deoxy
  misc_feature (19)..(19): 2'-deoxy-2'-fluoro
  misc_feature (20)..(20): n stands for thymidine
  misc_feature (21)..(21): 3'-3 attached terminal deoxyabasic moeity
uaaaguccagaagugcagcnn

SEQ ID NO: 1350 - RNA, 21 nt, Artificial Sequence
  Description of Artificial Sequence:  siNA sense region
  misc_feature (1)..(1): 5'-3 attached terminal deoxyabasic moeity
  misc_feature (1)..(2): 2'-deoxy-2'-fluoro
  misc_feature (3)..(3): 2'-deoxy
  misc_feature (4)..(8): 2'-deoxy-2'-fluoro
  misc_feature (9)..(10): 2'-deoxy
  misc_feature (11)..(12): 2'-deoxy-2'-fluoro
  misc_feature (13)..(13): 2'-deoxy
  misc_feature (14)..(15): 2'-deoxy-2'-fluoro
  misc_feature (16)..(17): 2'-deoxy
  misc_feature (18)..(19): 2'-deoxy-2'-fluoro
  misc_feature (20)..(20): n stands for thymidine
  misc_feature (21)..(21): 3'-3 attached terminal deoxyabasic moeity
ucacuucuggcugucaguunn

SEQ ID NO: 1351 - RNA, 21 nt, Artificial Sequence
  Description of Artificial Sequence:  siNA antisense region
  misc_feature (1)..(8): 2'-deoxy
  misc_feature (9)..(10): 2'-deoxy-2'-fluoro
  misc_feature (11)..(12): 2'-deoxy
  misc_feature (13)..(14): 2'-deoxy-2'-fluoro
  misc_feature (15)..(15): 2'-deoxy
  misc_feature (16)..(16): 2'-deoxy-2'-fluoro
  misc_feature (17)..(18): 2'-deoxy
  misc_feature (19)..(19): 2'-deoxy-2'-fluoro
  misc_feature (20)..(20): Phosphorothioate 3'-Internucleotide Linkage
  misc_feature (21)..(21): n stands for thymidine
ggaagaaaucagcuguggunn

SEQ ID NO: 1352 - RNA, 21 nt, Artificial Sequence
  Description of Artificial Sequence:  siNA antisense region
  misc_feature (1)..(1): 2'-deoxy
  misc_feature (2)..(2): 2'-deoxy-2'-fluoro
  misc_feature (3)..(3): 2'-deoxy
  misc_feature (4)..(4): 2'-deoxy-2'-fluoro
  misc_feature (5)..(6): 2'-deoxy
  misc_feature (7)..(7): 2'-deoxy-2'-fluoro
  misc_feature (8)..(9): 2'-deoxy
  misc_feature (10)..(11): 2'-deoxy-2'-fluoro
  misc_feature (12)..(19): 2'-deoxy
  misc_feature (20)..(20): Phosphorothioate 3'-Internucleotide Linkage
  misc_feature (21)..(21): n stands for thymidine
gcauaguggucaggaagaann

SEQ ID NO: 1353 - RNA, 21 nt, Artificial Sequence
  Description of Artificial Sequence:  siNA antisense region
  misc_feature (1)..(1): 2'-deoxy
  misc_feature (2)..(3): 2'-deoxy-2'-fluoro
  misc_feature (4)..(5): 2'-deoxy
  misc_feature (6)..(6): 2'-deoxy-2'-fluoro
  misc_feature (7)..(9): 2'-deoxy
  misc_feature (10)..(10): 2'-deoxy-2'-fluoro
  misc_feature (11)..(11): 2'-deoxy
  misc_feature (12)..(12): 2'-deoxy-2'-fluoro
  misc_feature (13)..(14): 2'-deoxy
  misc_feature (15)..(15): 2'-deoxy-2'-fluoro
  misc_feature (16)..(17): 2'-deoxy
  misc_feature (18)..(19): 2'-deoxy-2'-fluoro
  misc_feature (20)..(20): Phosphorothioate 3'-Internucleotide Linkage
  misc_feature (21)..(21): n stands for thymidine
gucagugggcauaguggucnn

SEQ ID NO: 1354 - RNA, 21 nt, Artificial Sequence
  Description of Artificial Sequence:  siNA antisense region
  misc_feature (1)..(1): 2'-deoxy
  misc_feature (2)..(2): 2'-deoxy-2'-fluoro
  misc_feature (3)..(7): 2'-deoxy
  misc_feature (8)..(8): 2'-deoxy-2'-fluoro
  misc_feature (9)..(9): 2'-deoxy
  misc_feature (10)..(11): 2'-deoxy-2'-fluoro
  misc_feature (12)..(18): 2'-deoxy
  misc_feature (19)..(19): 2'-deoxy-2'-fluoro
  misc_feature (20)..(20): Phosphorothioate 3'-Internucleotide Linkage
  misc_feature (21)..(21): n stands for thymidine
guggaaacacugagggagunn

SEQ ID NO: 1355 - RNA, 21 nt, Artificial Sequence
  Description of Artificial Sequence:  siNA antisense region
  misc_feature (1)..(2): 2'-deoxy
  misc_feature (3)..(3): 2'-deoxy-2'-fluoro
  misc_feature (4)..(5): 2'-deoxy
  misc_feature (6)..(6): 2'-deoxy-2'-fluoro
  misc_feature (7)..(7): 2'-deoxy
  misc_feature (8)..(8): 2'-deoxy-2'-fluoro
  misc_feature (9)..(12): 2'-deoxy
  misc_feature (13)..(13): 2'-deoxy-2'-fluoro
  misc_feature (14)..(17): 2'-deoxy
  misc_feature (18)..(19): 2'-deoxy-2'-fluoro
  misc_feature (20)..(20): Phosphorothioate 3'-Internucleotide Linkage
  misc_feature (21)..(21): n stands for thymidine
aauaaugcagagugagguunn

SEQ ID NO: 1356 - RNA, 21 nt, Artificial Sequence
  Description of Artificial Sequence:  siNA antisense region
  misc_feature (1)..(2): 2'-deoxy-2'-fluoro
  misc_feature (3)..(3): 2'-deoxy
  misc_feature (4)..(4): 2'-deoxy-2'-fluoro
  misc_feature (5)..(5): 2'-deoxy
  misc_feature (6)..(10): 2'-deoxy-2'-fluoro
  misc_feature (11)..(13): 2'-deoxy
  misc_feature (14)..(17): 2'-deoxy-2'-fluoro
  misc_feature (18)..(18): 2'-deoxy
  misc_feature (19)..(19): 2'-deoxy-2'-fluoro
  misc_feature (20)..(20): Phosphorothioate 3'-Internucleotide Linkage
  misc_feature (21)..(21): n stands for thymidine
cugcacuucuggacuuuaunn

SEQ ID NO: 1357 - RNA, 21 nt, Artificial Sequence
  Description of Artificial Sequence:  siNA antisense region
  misc_feature (1)..(1): 2'-deoxy
  misc_feature (2)..(3): 2'-deoxy-2'-fluoro
  misc_feature (4)..(4): 2'-deoxy
  misc_feature (5)..(5): 2'-deoxy-2'-fluoro
  misc_feature (6)..(6): 2'-deoxy
  misc_feature (7)..(11): 2'-deoxy-2'-fluoro
  misc_feature (12)..(14): 2'-deoxy
  misc_feature (15)..(18): 2'-deoxy-2'-fluoro
  misc_feature (19)..(19): 2'-deoxy
  misc_feature (20)..(20): Phosphorothioate 3'-Internucleotide Linkage
  misc_feature (21)..(21): n stands for thymidine
gcugcacuucuggacuuuann

SEQ ID NO: 1358 - RNA, 21 nt, Artificial Sequence
  Description of Artificial Sequence:  siNA antisense region
  misc_feature (1)..(2): 2'-deoxy
  misc_feature (3)..(4): 2'-deoxy-2'-fluoro
  misc_feature (5)..(6): 2'-deoxy
  misc_feature (7)..(7): 2'-deoxy-2'-fluoro
  misc_feature (8)..(9): 2'-deoxy
  misc_feature (10)..(11): 2'-deoxy-2'-fluoro
  misc_feature (12)..(16): 2'-deoxy
  misc_feature (17)..(17): 2'-deoxy-2'-fluoro
  misc_feature (18)..(19): 2'-deoxy
  misc_feature (20)..(20): Phosphorothioate 3'-Internucleotide Linkage
  misc_feature (21)..(21): n stands for thymidine
aacugacagccagaagugann

SEQ ID NO: 1359 - RNA, 21 nt, Artificial Sequence
  Description of Artificial Sequence:  siNA sense region
  misc_feature (1)..(1): 5'-3 attached terminal deoxyabasic moeity
  misc_feature (1)..(1): 2'-O-methyl
  misc_feature (2)..(3): 2'-deoxy-2'-fluoro
  misc_feature (4)..(4): 2'-O-methyl
  misc_feature (5)..(5): 2'-deoxy-2'-fluoro
  misc_feature (6)..(7): 2'-O-methyl
  misc_feature (8)..(9): 2'-deoxy-2'-fluoro
  misc_feature (10)..(11): 2'-O-methyl
  misc_feature (12)..(19): 2'-deoxy-2'-fluoro
  misc_feature (20)..(20): n stands for thymidine
  misc_feature (21)..(21): 3'-3 attached terminal deoxyabasic moeity
accacagcugauuucuuccnn

SEQ ID NO: 1360 - RNA, 21 nt, Artificial Sequence
  Description of Artificial Sequence:  siNA sense region
  misc_feature (1)..(1): 5'-3 attached terminal deoxyabasic moeity
  misc_feature (1)..(8): 2'-deoxy-2'-fluoro
  misc_feature (9)..(10): 2'-O-methyl
  misc_feature (11)..(12): 2'-deoxy-2'-fluoro
  misc_feature (13)..(13): 2'-O-methyl
  misc_feature (14)..(15): 2'-deoxy-2'-fluoro
  misc_feature (16)..(16): 2'-O-methyl
  misc_feature (17)..(17): 2'-deoxy-2'-fluoro
  misc_feature (18)..(18): 2'-O-methyl
  misc_feature (19)..(19): 2'-deoxy-2'-fluoro
  misc_feature (20)..(20): n stands for thymidine
  misc_feature (21)..(21): 3'-3 attached terminal deoxyabasic moeity
uucuuccugaccacuaugcnn

SEQ ID NO: 1361 - RNA, 21 nt, Artificial Sequence
  Description of Artificial Sequence:  siNA sense region
  misc_feature (1)..(1): 5'-3 attached terminal deoxyabasic moeity
  misc_feature (1)..(2): 2'-O-methyl
  misc_feature (3)..(4): 2'-deoxy-2'-fluoro
  misc_feature (5)..(5): 2'-O-methyl
  misc_feature (6)..(7): 2'-deoxy-2'-fluoro
  misc_feature (8)..(8): 2'-O-methyl
  misc_feature (9)..(9): 2'-deoxy-2'-fluoro
  misc_feature (10)..(10): 2'-O-methyl
  misc_feature (11)..(13): 2'-deoxy-2'-fluoro
  misc_feature (14)..(14): 2'-O-methyl
  misc_feature (15)..(16): 2'-deoxy-2'-fluoro
  misc_feature (17)..(18): 2'-O-methyl
  misc_feature (19)..(19): 2'-deoxy-2'-fluoro
  misc_feature (20)..(20): n stands for thymidine
  misc_feature (21)..(21): 3'-3 attached terminal deoxyabasic moeity
gaccacuaugcccacugacnn

SEQ ID NO: 1362 - RNA, 21 nt, Artificial Sequence
  Description of Artificial Sequence:  siNA sense region
  misc_feature (1)..(1): 5'-3 attached terminal deoxyabasic moeity
  misc_feature (1)..(1): 2'-O-methyl
  misc_feature (2)..(8): 2'-deoxy-2'-fluoro
  misc_feature (9)..(10): 2'-O-methyl
  misc_feature (11)..(11): 2'-deoxy-2'-fluoro
  misc_feature (12)..(12): 2'-O-methyl
  misc_feature (13)..(17): 2'-deoxy-2'-fluoro
  misc_feature (18)..(18): 2'-O-methyl
  misc_feature (19)..(19): 2'-deoxy-2'-fluoro
  misc_feature (20)..(20): n stands for thymidine
  misc_feature (21)..(21): 3'-3 attached terminal deoxyabasic moeity
acucccucaguguuuccacnn

SEQ ID NO: 1363 - RNA, 21 nt, Artificial Sequence
  Description of Artificial Sequence:  siNA sense region
  misc_feature (1)..(1): 5'-3 attached terminal deoxyabasic moeity
  misc_feature (1)..(2): 2'-O-methyl
  misc_feature (3)..(6): 2'-deoxy-2'-fluoro
  misc_feature (7)..(7): 2'-O-methyl
  misc_feature (8)..(11): 2'-deoxy-2'-fluoro
  misc_feature (12)..(12): 2'-O-methyl
  misc_feature (13)..(13): 2'-deoxy-2'-fluoro
  misc_feature (14)..(14): 2'-O-methyl
  misc_feature (15)..(16): 2'-deoxy-2'-fluoro
  misc_feature (17)..(17): 2'-O-methyl
  misc_feature (18)..(19): 2'-deoxy-2'-fluoro
  misc_feature (20)..(20): n stands for thymidine
  misc_feature (21)..(21): 3'-3 attached terminal deoxyabasic moeity
aaccucacucugcauuauunn

SEQ ID NO: 1364 - RNA, 21 nt, Artificial Sequence
  Description of Artificial Sequence:  siNA sense region
  misc_feature (1)..(1): 5'-3 attached terminal deoxyabasic moeity
  misc_feature (1)..(1): 2'-O-methyl
  misc_feature (2)..(2): 2'-deoxy-2'-fluoro
  misc_feature (3)..(6): 2'-O-methyl
  misc_feature (7)..(9): 2'-deoxy-2'-fluoro
  misc_feature (10)..(14): 2'-O-methyl
  misc_feature (15)..(15): 2'-deoxy-2'-fluoro
  misc_feature (16)..(16): 2'-O-methyl
  misc_feature (17)..(17): 2'-deoxy-2'-fluoro
  misc_feature (18)..(19): 2'-O-methyl
  misc_feature (20)..(20): n stands for thymidine
  misc_feature (21)..(21): 3'-3 attached terminal deoxyabasic moeity
auaaaguccagaagugcagnn

SEQ ID NO: 1365 - RNA, 21 nt, Artificial Sequence
  Description of Artificial Sequence:  siNA sense region
  misc_feature (1)..(1): 2'-deoxy-2'-fluoro
  misc_feature (1)..(1): 5'-3 attached terminal deoxyabasic moeity
  misc_feature (2)..(5): 2'-O-methyl
  misc_feature (6)..(8): 2'-deoxy-2'-fluoro
  misc_feature (9)..(13): 2'-O-methyl
  misc_feature (14)..(14): 2'-deoxy-2'-fluoro
  misc_feature (15)..(15): 2'-O-methyl
  misc_feature (16)..(16): 2'-deoxy-2'-fluoro
  misc_feature (17)..(18): 2'-O-methyl
  misc_feature (19)..(19): 2'-deoxy-2'-fluoro
  misc_feature (20)..(20): n stands for thymidine
  misc_feature (21)..(21): 3'-3 attached terminal deoxyabasic moeity
uaaaguccagaagugcagcnn

SEQ ID NO: 1366 - RNA, 21 nt, Artificial Sequence
  Description of Artificial Sequence:  siNA sense region
  misc_feature (1)..(1): 5'-3 attached terminal deoxyabasic moeity
  misc_feature (1)..(2): 2'-deoxy-2'-fluoro
  misc_feature (3)..(3): 2'-O-methyl
  misc_feature (4)..(8): 2'-deoxy-2'-fluoro
  misc_feature (9)..(10): 2'-O-methyl
  misc_feature (11)..(12): 2'-deoxy-2'-fluoro
  misc_feature (13)..(13): 2'-O-methyl
  misc_feature (14)..(15): 2'-deoxy-2'-fluoro
  misc_feature (16)..(17): 2'-O-methyl
  misc_feature (18)..(19): 2'-deoxy-2'-fluoro
  misc_feature (20)..(20): n stands for thymidine
  misc_feature (21)..(21): 3'-3 attached terminal deoxyabasic moeity
ucacuucuggcugucaguunn

SEQ ID NO: 1367 - RNA, 21 nt, Artificial Sequence
  Description of Artificial Sequence:  siNA antisense region
  misc_feature (1)..(8): 2'-O-methyl
  misc_feature (9)..(10): 2'-deoxy-2'-fluoro
  misc_feature (11)..(12): 2'-O-methyl
  misc_feature (13)..(14): 2'-deoxy-2'-fluoro
  misc_feature (15)..(15): 2'-O-methyl
  misc_feature (16)..(16): 2'-deoxy-2'-fluoro
  misc_feature (17)..(18): 2'-O-methyl
  misc_feature (19)..(19): 2'-deoxy-2'-fluoro
  misc_feature (20)..(20): Phosphorothioate 3'-Internucleotide Linkage
  misc_feature (21)..(21): n stands for thymidine
ggaagaaaucagcuguggunn

SEQ ID NO: 1368 - RNA, 21 nt, Artificial Sequence
  Description of Artificial Sequence:  siNA antisense region
  misc_feature (1)..(1): 2'-O-methyl
  misc_feature (2)..(2): 2'-deoxy-2'-fluoro
  misc_feature (3)..(3): 2'-O-methyl
  misc_feature (4)..(4): 2'-deoxy-2'-fluoro
  misc_feature (5)..(6): 2'-O-methyl
  misc_feature (7)..(7): 2'-deoxy-2'-fluoro
  misc_feature (8)..(9): 2'-O-methyl
  misc_feature (10)..(11): 2'-deoxy-2'-fluoro
  misc_feature (12)..(19): 2'-O-methyl
  misc_feature (20)..(20): Phosphorothioate 3'-Internucleotide Linkage
  misc_feature (21)..(21): n stands for thymidine
gcauaguggucaggaagaann

SEQ ID NO: 1369 - RNA, 21 nt, Artificial Sequence
  Description of Artificial Sequence:  siNA antisense region
  misc_feature (1)..(1): 2'-O-methyl
  misc_feature (2)..(3): 2'-deoxy-2'-fluoro
  misc_feature (4)..(5): 2'-O-methyl
  misc_feature (6)..(6): 2'-deoxy-2'-fluoro
  misc_feature (7)..(9): 2'-O-methyl
  misc_feature (10)..(10): 2'-deoxy-2'-fluoro
  misc_feature (11)..(11): 2'-O-methyl
  misc_feature (12)..(12): 2'-deoxy-2'-fluoro
  misc_feature (13)..(14): 2'-O-methyl
  misc_feature (15)..(15): 2'-deoxy-2'-fluoro
  misc_feature (16)..(17): 2'-O-methyl
  misc_feature (18)..(19): 2'-deoxy-2'-fluoro
  misc_feature (20)..(20): Phosphorothioate 3'-Internucleotide Linkage
  misc_feature (21)..(21): n stands for thymidine
gucagugggcauaguggucnn

SEQ ID NO: 1370 - RNA, 21 nt, Artificial Sequence
  Description of Artificial Sequence:  siNA antisense region
  misc_feature (1)..(1): 2'-O-methyl
  misc_feature (2)..(2): 2'-deoxy-2'-fluoro
  misc_feature (3)..(7): 2'-O-methyl
  misc_feature (8)..(8): 2'-deoxy-2'-fluoro
  misc_feature (9)..(9): 2'-O-methyl
  misc_feature (10)..(11): 2'-deoxy-2'-fluoro
  misc_feature (12)..(18): 2'-O-methyl
  misc_feature (19)..(19): 2'-deoxy-2'-fluoro
  misc_feature (20)..(20): Phosphorothioate 3'-Internucleotide Linkage
  misc_feature (21)..(21): n stands for thymidine
guggaaacacugagggagunn

SEQ ID NO: 1371 - RNA, 21 nt, Artificial Sequence
  Description of Artificial Sequence:  siNA antisense region
  misc_feature (1)..(2): 2'-O-methyl
  misc_feature (3)..(3): 2'-deoxy-2'-fluoro
  misc_feature (4)..(5): 2'-O-methyl
  misc_feature (6)..(6): 2'-deoxy-2'-fluoro
  misc_feature (7)..(7): 2'-O-methyl
  misc_feature (8)..(8): 2'-deoxy-2'-fluoro
  misc_feature (9)..(12): 2'-O-methyl
  misc_feature (13)..(13): 2'-deoxy-2'-fluoro
  misc_feature (14)..(17): 2'-O-methyl
  misc_feature (18)..(19): 2'-deoxy-2'-fluoro
  misc_feature (20)..(20): Phosphorothioate 3'-Internucleotide Linkage
  misc_feature (21)..(21): n stands for thymidine
aauaaugcagagugagguunn

SEQ ID NO: 1372 - RNA, 21 nt, Artificial Sequence
  Description of Artificial Sequence:  siNA antisense region
  misc_feature (1)..(2): 2'-deoxy-2'-fluoro
  misc_feature (3)..(3): 2'-O-methyl
  misc_feature (4)..(4): 2'-deoxy-2'-fluoro
  misc_feature (5)..(5): 2'-O-methyl
  misc_feature (6)..(10): 2'-deoxy-2'-fluoro
  misc_feature (11)..(13): 2'-O-methyl
  misc_feature (14)..(17): 2'-deoxy-2'-fluoro
  misc_feature (18)..(18): 2'-O-methyl
  misc_feature (19)..(19): 2'-deoxy-2'-fluoro
  misc_feature (20)..(20): Phosphorothioate 3'-Internucleotide Linkage
  misc_feature (21)..(21): n stands for thymidine
cugcacuucuggacuuuaunn

SEQ ID NO: 1373 - RNA, 21 nt, Artificial Sequence
  Description of Artificial Sequence:  siNA antisense region
  misc_feature (1)..(1): 2'-O-methyl
  misc_feature (2)..(3): 2'-deoxy-2'-fluoro
  misc_feature (4)..(4): 2'-O-methyl
  misc_feature (5)..(5): 2'-deoxy-2'-fluoro
  misc_feature (6)..(6): 2'-O-methyl
  misc_feature (7)..(11): 2'-deoxy-2'-fluoro
  misc_feature (12)..(14): 2'-O-methyl
  misc_feature (15)..(18): 2'-deoxy-2'-fluoro
  misc_feature (19)..(19): 2'-O-methyl
  misc_feature (20)..(20): Phosphorothioate 3'-Internucleotide Linkage
  misc_feature (21)..(21): n stands for thymidine
gcugcacuucuggacuuuann

SEQ ID NO: 1374 - RNA, 21 nt, Artificial Sequence
  Description of Artificial Sequence:  siNA antisense region
  misc_feature (1)..(2): 2'-O-methyl
  misc_feature (3)..(4): 2'-deoxy-2'-fluoro
  misc_feature (5)..(6): 2'-O-methyl
  misc_feature (7)..(7): 2'-deoxy-2'-fluoro
  misc_feature (8)..(9): 2'-O-methyl
  misc_feature (10)..(11): 2'-deoxy-2'-fluoro
  misc_feature (12)..(16): 2'-O-methyl
  misc_feature (17)..(17): 2'-deoxy-2'-fluoro
  misc_feature (18)..(19): 2'-O-methyl
  misc_feature (20)..(20): Phosphorothioate 3'-Internucleotide Linkage
  misc_feature (21)..(21): n stands for thymidine
aacugacagccagaagugann

SEQ ID NO: 1375 - RNA, 21 nt, Artificial Sequence
  Description of Artificial Sequence:  siNA sense region
  misc_feature (1)..(1): 5'-3 attached terminal deoxyabasic moeity
  misc_feature (20)..(20): n stands for thymidine
  misc_feature (21)..(21): 3'-3 attached terminal deoxyabasic moeity
accacagcugauuucuuccnn

SEQ ID NO: 1376 - RNA, 21 nt, Artificial Sequence
  Description of Artificial Sequence:  siNA sense region
  misc_feature (1)..(1): 5'-3 attached terminal deoxyabasic moeity
  misc_feature (20)..(20): n stands for thymidine
  misc_feature (21)..(21): 3'-3 attached terminal deoxyabasic moeity
uucuuccugaccacuaugcnn

SEQ ID NO: 1377 - RNA, 21 nt, Artificial Sequence
  Description of Artificial Sequence:  siNA sense region
  misc_feature (1)..(1): 5'-3 attached terminal deoxyabasic moeity
  misc_feature (20)..(20): n stands for thymidine
  misc_feature (21)..(21): 3'-3 attached terminal deoxyabasic moeity
gaccacuaugcccacugacnn

SEQ ID NO: 1378 - RNA, 21 nt, Artificial Sequence
  Description of Artificial Sequence:  siNA sense region
  misc_feature (1)..(1): 5'-3 attached terminal deoxyabasic moeity
  misc_feature (20)..(20): n stands for thymidine
  misc_feature (21)..(21): 3'-3 attached terminal deoxyabasic moeity
acucccucaguguuuccacnn

SEQ ID NO: 1379 - RNA, 21 nt, Artificial Sequence
  Description of Artificial Sequence:  siNA sense region
  misc_feature (1)..(1): 5'-3 attached terminal deoxyabasic moeity
  misc_feature (20)..(20): n stands for thymidine
  misc_feature (21)..(21): 3'-3 attached terminal deoxyabasic moeity
aaccucacucugcauuauunn

SEQ ID NO: 1380 - RNA, 21 nt, Artificial Sequence
  Description of Artificial Sequence:  siNA sense region
  misc_feature (1)..(1): 5'-3 attached terminal deoxyabasic moeity
  misc_feature (20)..(20): n stands for thymidine
  misc_feature (21)..(21): 3'-3 attached terminal deoxyabasic moeity
auaaaguccagaagugcagnn

SEQ ID NO: 1381 - RNA, 21 nt, Artificial Sequence
  Description of Artificial Sequence:  siNA sense region
  misc_feature (1)..(1): 5'-3 attached terminal deoxyabasic moeity
  misc_feature (20)..(20): n stands for thymidine
  misc_feature (21)..(21): 3'-3 attached terminal deoxyabasic moeity
uaaaguccagaagugcagcnn

SEQ ID NO: 1382 - RNA, 21 nt, Artificial Sequence
  Description of Artificial Sequence:  siNA sense region
  misc_feature (1)..(1): 5'-3 attached terminal deoxyabasic moeity
  misc_feature (20)..(20): n stands for thymidine
  misc_feature (21)..(21): 3'-3 attached terminal deoxyabasic moeity
ucacuucuggcugucaguunn

SEQ ID NO: 1383 - RNA, 21 nt, Artificial Sequence
  Description of Artificial Sequence:  siNA antisense region
  misc_feature (20)..(20): Phosphorothioate 3'-Internucleotide Linkage
  misc_feature (21)..(21): n stands for thymidine
ggaagaaaucagcuguggunn

SEQ ID NO: 1384 - RNA, 21 nt, Artificial Sequence
  Description of Artificial Sequence:  siNA antisense region
  misc_feature (20)..(20): Phosphorothioate 3'-Internucleotide Linkage
  misc_feature (21)..(21): n stands for thymidine
gcauaguggucaggaagaann

SEQ ID NO: 1385 - RNA, 21 nt, Artificial Sequence
  Description of Artificial Sequence:  siNA antisense region
  misc_feature (20)..(20): Phosphorothioate 3'-Internucleotide Linkage
  misc_feature (21)..(21): n stands for thymidine
gucagugggcauaguggucnn

SEQ ID NO: 1386 - RNA, 21 nt, Artificial Sequence
  Description of Artificial Sequence:  siNA antisense region
  misc_feature (20)..(20): Phosphorothioate 3'-Internucleotide Linkage
  misc_feature (21)..(21): n stands for thymidine
guggaaacacugagggagunn

SEQ ID NO: 1387 - RNA, 21 nt, Artificial Sequence
  Description of Artificial Sequence:  siNA antisense region
  misc_feature (20)..(20): Phosphorothioate 3'-Internucleotide Linkage
  misc_feature (21)..(21): n stands for thymidine
aauaaugcagagugagguunn

SEQ ID NO: 1388 - RNA, 21 nt, Artificial Sequence
  Description of Artificial Sequence:  siNA antisense region
  misc_feature (20)..(20): Phosphorothioate 3'-Internucleotide Linkage
  misc_feature (21)..(21): n stands for thymidine
cugcacuucuggacuuuaunn

SEQ ID NO: 1389 - RNA, 21 nt, Artificial Sequence
  Description of Artificial Sequence:  siNA antisense region
  misc_feature (20)..(20): Phosphorothioate 3'-Internucleotide Linkage
  misc_feature (21)..(21): n stands for thymidine
gcugcacuucuggacuuuann

SEQ ID NO: 1390 - RNA, 21 nt, Artificial Sequence
  Description of Artificial Sequence:  siNA antisense region
  misc_feature (20)..(20): Phosphorothioate 3'-Internucleotide Linkage
  misc_feature (21)..(21): n stands for thymidine
aacugacagccagaagugann

SEQ ID NO: 1391 - RNA, 21 nt, Artificial Sequence
  Description of Artificial Sequence:  siNA antisense region
  misc_feature (1)..(1): 5'-3 attached terminal deoxyabasic moeity
  misc_feature (9)..(10): 2'-deoxy-2'-fluoro
  misc_feature (13)..(14): 2'-deoxy-2'-fluoro
  misc_feature (16)..(16): 2'-deoxy-2'-fluoro
  misc_feature (19)..(19): 2'-deoxy-2'-fluoro
  misc_feature (20)..(20): n stands for thymidine
  misc_feature (21)..(21): 3'-3 attached terminal deoxyabasic moeity
ggaagaaaucagcuguggunn

SEQ ID NO: 1392 - RNA, 21 nt, Artificial Sequence
  Description of Artificial Sequence:  siNA antisense region
  misc_feature (1)..(1): 5'-3 attached terminal deoxyabasic moeity
  misc_feature (2)..(2): 2'-deoxy-2'-fluoro
  misc_feature (4)..(4): 2'-deoxy-2'-fluoro
  misc_feature (7)..(7): 2'-deoxy-2'-fluoro
  misc_feature (10)..(11): 2'-deoxy-2'-fluoro
  misc_feature (20)..(20): n stands for thymidine
  misc_feature (21)..(21): 3'-3 attached terminal deoxyabasic moeity
gcauaguggucaggaagaann

SEQ ID NO: 1393 - RNA, 21 nt, Artificial Sequence
  Description of Artificial Sequence:  siNA antisense region
  misc_feature (1)..(1): 5'-3 attached terminal deoxyabasic moeity
  misc_feature (2)..(3): 2'-deoxy-2'-fluoro
  misc_feature (6)..(6): 2'-deoxy-2'-fluoro
  misc_feature (10)..(10): 2'-deoxy-2'-fluoro
  misc_feature (12)..(12): 2'-deoxy-2'-fluoro
  misc_feature (15)..(15): 2'-deoxy-2'-fluoro
  misc_feature (18)..(19): 2'-deoxy-2'-fluoro
  misc_feature (20)..(20): n stands for thymidine
  misc_feature (21)..(21): 3'-3 attached terminal deoxyabasic moeity
gucagugggcauaguggucnn

SEQ ID NO: 1394 - RNA, 21 nt, Artificial Sequence
  Description of Artificial Sequence:  siNA antisense region
  misc_feature (1)..(1): 5'-3 attached terminal deoxyabasic moeity
  misc_feature (2)..(2): 2'-deoxy-2'-fluoro
  misc_feature (8)..(8): 2'-deoxy-2'-fluoro
  misc_feature (10)..(11): 2'-deoxy-2'-fluoro
  misc_feature (19)..(19): 2'-deoxy-2'-fluoro
  misc_feature (20)..(20): n stands for thymidine
  misc_feature (21)..(21): 3'-3 attached terminal deoxyabasic moeity
guggaaacacugagggagunn

SEQ ID NO: 1395 - RNA, 21 nt, Artificial Sequence
  Description of Artificial Sequence:  siNA antisense region
  misc_feature (1)..(1): 5'-3 attached terminal deoxyabasic moeity
  misc_feature (3)..(3): 2'-deoxy-2'-fluoro
  misc_feature (6)..(6): 2'-deoxy-2'-fluoro
  misc_feature (8)..(8): 2'-deoxy-2'-fluoro
  misc_feature (13)..(13): 2'-deoxy-2'-fluoro
  misc_feature (18)..(19): 2'-deoxy-2'-fluoro
  misc_feature (20)..(20): n stands for thymidine
  misc_feature (21)..(21): 3'-3 attached terminal deoxyabasic moeity
aauaaugcagagugagguunn

SEQ ID NO: 1396 - RNA, 21 nt, Artificial Sequence
  Description of Artificial Sequence:  siNA antisense region
  misc_feature (1)..(1): 5'-3 attached terminal deoxyabasic moeity
  misc_feature (1)..(2): 2'-deoxy-2'-fluoro
  misc_feature (4)..(4): 2'-deoxy-2'-fluoro
  misc_feature (6)..(10): 2'-deoxy-2'-fluoro
  misc_feature (14)..(17): 2'-deoxy-2'-fluoro
  misc_feature (19)..(19): 2'-deoxy-2'-fluoro
  misc_feature (20)..(20): n stands for thymidine
  misc_feature (21)..(21): 3'-3 attached terminal deoxyabasic moeity
cugcacuucuggacuuuaunn

SEQ ID NO: 1397 - RNA, 21 nt, Artificial Sequence
  Description of Artificial Sequence:  siNA antisense region
  misc_feature (1)..(1): 5'-3 attached terminal deoxyabasic moeity
  misc_feature (2)..(3): 2'-deoxy-2'-fluoro
  misc_feature (5)..(5): 2'-deoxy-2'-fluoro
  misc_feature (7)..(11): 2'-deoxy-2'-fluoro
  misc_feature (15)..(18): 2'-deoxy-2'-fluoro
  misc_feature (20)..(20): n stands for thymidine
  misc_feature (21)..(21): 3'-3 attached terminal deoxyabasic moeity
gcugcacuucuggacuuuann

SEQ ID NO: 1398 - RNA, 21 nt, Artificial Sequence
  Description of Artificial Sequence:  siNA antisense region
  misc_feature (1)..(1): 5'-3 attached terminal deoxyabasic moeity
  misc_feature (3)..(4): 2'-deoxy-2'-fluoro
  misc_feature (7)..(7): 2'-deoxy-2'-fluoro
  misc_feature (10)..(11): 2'-deoxy-2'-fluoro
  misc_feature (17)..(17): 2'-deoxy-2'-fluoro
  misc_feature (20)..(20): n stands for thymidine
  misc_feature (21)..(21): 3'-3 attached terminal deoxyabasic moeity
aacugacagccagaagugann

SEQ ID NO: 1399 - RNA, 21 nt, Artificial Sequence
  Description of Artificial Sequence:  siNA antisense region
  misc_feature (1)..(1): 5'-3 attached terminal deoxyabasic moeity
  misc_feature (20)..(20): n stands for thymidine
  misc_feature (21)..(21): 3'-3 attached terminal deoxyabasic moeity
ggaagaaaucagcuguggunn

SEQ ID NO: 1400 - RNA, 21 nt, Artificial Sequence
  Description of Artificial Sequence:  siNA antisense region
  misc_feature (1)..(1): 5'-3 attached terminal deoxyabasic moeity
  misc_feature (20)..(20): n stands for thymidine
  misc_feature (21)..(21): 3'-3 attached terminal deoxyabasic moeity
gcauaguggucaggaagaann

SEQ ID NO: 1401 - RNA, 21 nt, Artificial Sequence
  Description of Artificial Sequence:  siNA antisense region
  misc_feature (1)..(1): 5'-3 attached terminal deoxyabasic moeity
  misc_feature (20)..(20): n stands for thymidine
  misc_feature (21)..(21): 3'-3 attached terminal deoxyabasic moeity
gucagugggcauaguggucnn

SEQ ID NO: 1402 - RNA, 21 nt, Artificial Sequence
  Description of Artificial Sequence:  siNA antisense region
  misc_feature (1)..(1): 5'-3 attached terminal deoxyabasic moeity
  misc_feature (20)..(20): n stands for thymidine
  misc_feature (21)..(21): 3'-3 attached terminal deoxyabasic moeity
guggaaacacugagggagunn

SEQ ID NO: 1403 - RNA, 21 nt, Artificial Sequence
  Description of Artificial Sequence:  siNA antisense region
  misc_feature (1)..(1): 5'-3 attached terminal deoxyabasic moeity
  misc_feature (20)..(20): n stands for thymidine
  misc_feature (21)..(21): 3'-3 attached terminal deoxyabasic moeity
aauaaugcagagugagguunn

SEQ ID NO: 1404 - RNA, 21 nt, Artificial Sequence
  Description of Artificial Sequence:  siNA antisense region
  misc_feature (1)..(1): 5'-3 attached terminal deoxyabasic moeity
  misc_feature (20)..(20): n stands for thymidine
  misc_feature (21)..(21): 3'-3 attached terminal deoxyabasic moeity
cugcacuucuggacuuuaunn

SEQ ID NO: 1405 - RNA, 21 nt, Artificial Sequence
  Description of Artificial Sequence:  siNA antisense region
  misc_feature (1)..(1): 5'-3 attached terminal deoxyabasic moeity
  misc_feature (20)..(20): n stands for thymidine
  misc_feature (21)..(21): 3'-3 attached terminal deoxyabasic moeity
gcugcacuucuggacuuuann

SEQ ID NO: 1406 - RNA, 21 nt, Artificial Sequence
  Description of Artificial Sequence:  siNA antisense region
  misc_feature (1)..(1): 5'-3 attached terminal deoxyabasic moeity
  misc_feature (20)..(20): n stands for thymidine
  misc_feature (21)..(21): 3'-3 attached terminal deoxyabasic moeity
aacugacagccagaagugann

SEQ ID NO: 1407 - RNA, 21 nt, Artificial Sequence
  Description of Artificial Sequence:  siNA sense region
  misc_feature (20)..(21): n stands for thymidine
gccucacagagcagaagacnn

SEQ ID NO: 1408 - RNA, 21 nt, Artificial Sequence
  Description of Artificial Sequence:  siNA sense region
  misc_feature (20)..(21): n stands for thymidine
cucacagagcagaagacucnn

SEQ ID NO: 1409 - RNA, 21 nt, Artificial Sequence
  Description of Artificial Sequence:  siNA sense region
  misc_feature (20)..(21): n stands for thymidine
gaguugaccguaacagacann

SEQ ID NO: 1410 - RNA, 21 nt, Artificial Sequence
  Description of Artificial Sequence:  siNA sense region
  misc_feature (20)..(21): n stands for thymidine
uaacagacaucuuugcugcnn

SEQ ID NO: 1411 - RNA, 21 nt, Artificial Sequence
  Description of Artificial Sequence:  siNA sense region
  misc_feature (20)..(21): n stands for thymidine
cuccaagaacacaacugagnn

SEQ ID NO: 1412 - RNA, 21 nt, Artificial Sequence
  Description of Artificial Sequence:  siNA sense region
  misc_feature (20)..(21): n stands for thymidine
uacagccaccaugagaaggnn

SEQ ID NO: 1413 - RNA, 21 nt, Artificial Sequence
  Description of Artificial Sequence:  siNA sense region
  misc_feature (20)..(21): n stands for thymidine
gaauuccuguccugugaagnn

SEQ ID NO: 1414 - RNA, 21 nt, Artificial Sequence
  Description of Artificial Sequence:  siNA sense region
  misc_feature (20)..(21): n stands for thymidine
aggaagccaaccagaguacnn

SEQ ID NO: 1415 - RNA, 21 nt, Artificial Sequence
  Description of Artificial Sequence:  siNA antisense region
  misc_feature (20)..(21): n stands for thymidine
gucuucugcucugugaggcnn

SEQ ID NO: 1416 - RNA, 21 nt, Artificial Sequence
  Description of Artificial Sequence:  siNA antisense region
  misc_feature (20)..(21): n stands for thymidine
gagucuucugcucugugagnn

SEQ ID NO: 1417 - RNA, 21 nt, Artificial Sequence
  Description of Artificial Sequence:  siNA antisense region
  misc_feature (20)..(21): n stands for thymidine
ugucuguuacggucaacucnn

SEQ ID NO: 1418 - RNA, 21 nt, Artificial Sequence
  Description of Artificial Sequence:  siNA antisense region
  misc_feature (20)..(21): n stands for thymidine
gcagcaaagaugucuguuann

SEQ ID NO: 1419 - RNA, 21 nt, Artificial Sequence
  Description of Artificial Sequence:  siNA antisense region
  misc_feature (20)..(21): n stands for thymidine
cucaguuguguucuuggagnn

SEQ ID NO: 1420 - RNA, 21 nt, Artificial Sequence
  Description of Artificial Sequence:  siNA antisense region
  misc_feature (20)..(21): n stands for thymidine
ccuucucaugguggcuguann

SEQ ID NO: 1421 - RNA, 21 nt, Artificial Sequence
  Description of Artificial Sequence:  siNA antisense region
  misc_feature (20)..(21): n stands for thymidine
cuucacaggacaggaauucnn

SEQ ID NO: 1422 - RNA, 21 nt, Artificial Sequence
  Description of Artificial Sequence:  siNA antisense region
  misc_feature (20)..(21): n stands for thymidine
guacucugguuggcuuccunn

SEQ ID NO: 1423 - RNA, 21 nt, Artificial Sequence
  Description of Artificial Sequence:  siNA sense region
  misc_feature (1)..(1): 5'-3 attached terminal deoxyabasic moeity
  misc_feature (2)..(5): 2'-deoxy-2'-fluoro
  misc_feature (7)..(7): 2'-deoxy-2'-fluoro
  misc_feature (12)..(12): 2'-deoxy-2'-fluoro
  misc_feature (19)..(19): 2'-deoxy-2'-fluoro
  misc_feature (20)..(20): n stands for thymidine
  misc_feature (21)..(21): 3'-3 attached terminal deoxyabasic moeity
gccucacagagcagaagacnn

SEQ ID NO: 1424 - RNA, 21 nt, Artificial Sequence
  Description of Artificial Sequence:  siNA sense region
  misc_feature (1)..(1): 5'-3 attached terminal deoxyabasic moeity
  misc_feature (1)..(3): 2'-deoxy-2'-fluoro
  misc_feature (5)..(5): 2'-deoxy-2'-fluoro
  misc_feature (10)..(10): 2'-deoxy-2'-fluoro
  misc_feature (17)..(19): 2'-deoxy-2'-fluoro
  misc_feature (20)..(20): n stands for thymidine
  misc_feature (21)..(21): 3'-3 attached terminal deoxyabasic moeity
cucacagagcagaagacucnn

SEQ ID NO: 1425 - RNA, 21 nt, Artificial Sequence
  Description of Artificial Sequence:  siNA sense region
  misc_feature (1)..(1): 5'-3 attached terminal deoxyabasic moeity
  misc_feature (4)..(5): 2'-deoxy-2'-fluoro
  misc_feature (8)..(9): 2'-deoxy-2'-fluoro
  misc_feature (11)..(11): 2'-deoxy-2'-fluoro
  misc_feature (14)..(14): 2'-deoxy-2'-fluoro
  misc_feature (18)..(18): 2'-deoxy-2'-fluoro
  misc_feature (20)..(20): n stands for thymidine
  misc_feature (21)..(21): 3'-3 attached terminal deoxyabasic moeity
gaguugaccguaacagacann

SEQ ID NO: 1426 - RNA, 21 nt, Artificial Sequence
  Description of Artificial Sequence:  siNA sense region
  misc_feature (1)..(1): 5'-3 attached terminal deoxyabasic moeity
  misc_feature (1)..(1): 2'-deoxy-2'-fluoro
  misc_feature (4)..(4): 2'-deoxy-2'-fluoro
  misc_feature (8)..(8): 2'-deoxy-2'-fluoro
  misc_feature (10)..(14): 2'-deoxy-2'-fluoro
  misc_feature (16)..(17): 2'-deoxy-2'-fluoro
  misc_feature (19)..(19): 2'-deoxy-2'-fluoro
  misc_feature (20)..(20): n stands for thymidine
  misc_feature (21)..(21): 3'-3 attached terminal deoxyabasic moeity
uaacagacaucuuugcugcnn

SEQ ID NO: 1427 - RNA, 21 nt, Artificial Sequence
  Description of Artificial Sequence:  siNA sense region
  misc_feature (1)..(1): 5'-3 attached terminal deoxyabasic moeity
  misc_feature (1)..(4): 2'-deoxy-2'-fluoro
  misc_feature (10)..(10): 2'-deoxy-2'-fluoro
  misc_feature (12)..(12): 2'-deoxy-2'-fluoro
  misc_feature (15)..(16): 2'-deoxy-2'-fluoro
  misc_feature (20)..(20): n stands for thymidine
  misc_feature (21)..(21): 3'-3 attached terminal deoxyabasic moeity
cuccaagaacacaacugagnn

SEQ ID NO: 1428 - RNA, 21 nt, Artificial Sequence
  Description of Artificial Sequence:  siNA sense region
  misc_feature (1)..(1): 5'-3 attached terminal deoxyabasic moeity
  misc_feature (1)..(1): 2'-deoxy-2'-fluoro
  misc_feature (3)..(3): 2'-deoxy-2'-fluoro
  misc_feature (6)..(7): 2'-deoxy-2'-fluoro
  misc_feature (9)..(10): 2'-deoxy-2'-fluoro
  misc_feature (12)..(12): 2'-deoxy-2'-fluoro
  misc_feature (20)..(20): n stands for thymidine
  misc_feature (21)..(21): 3'-3 attached terminal deoxyabasic moeity
uacagccaccaugagaaggnn

SEQ ID NO: 1429 - RNA, 21 nt, Artificial Sequence
  Description of Artificial Sequence:  siNA sense region
  misc_feature (1)..(1): 5'-3 attached terminal deoxyabasic moeity
  misc_feature (4)..(8): 2'-deoxy-2'-fluoro
  misc_feature (10)..(13): 2'-deoxy-2'-fluoro
  misc_feature (16)..(16): 2'-deoxy-2'-fluoro
  misc_feature (20)..(20): n stands for thymidine
  misc_feature (21)..(21): 3'-3 attached terminal deoxyabasic moeity
gaauuccuguccugugaagnn

SEQ ID NO: 1430 - RNA, 21 nt, Artificial Sequence
  Description of Artificial Sequence:  siNA sense region
  misc_feature (1)..(1): 5'-3 attached terminal deoxyabasic moeity
  misc_feature (7)..(8): 2'-deoxy-2'-fluoro
  misc_feature (11)..(12): 2'-deoxy-2'-fluoro
  misc_feature (17)..(17): 2'-deoxy-2'-fluoro
  misc_feature (19)..(19): 2'-deoxy-2'-fluoro
  misc_feature (20)..(20): n stands for thymidine
  misc_feature (21)..(21): 3'-3 attached terminal deoxyabasic moeity
aggaagccaaccagaguacnn

SEQ ID NO: 1431 - RNA, 21 nt, Artificial Sequence
  Description of Artificial Sequence:  siNA antisense region
  misc_feature (2)..(7): 2'-deoxy-2'-fluoro
  misc_feature (9)..(12): 2'-deoxy-2'-fluoro
  misc_feature (14)..(14): 2'-deoxy-2'-fluoro
  misc_feature (19)..(19): 2'-deoxy-2'-fluoro
  misc_feature (20)..(20): Phosphorothioate 3'-Internucleotide Linkage
  misc_feature (21)..(21): n stands for thymidine
gucuucugcucugugaggcnn

SEQ ID NO: 1432 - RNA, 21 nt, Artificial Sequence
  Description of Artificial Sequence:  siNA antisense region
  misc_feature (4)..(9): 2'-deoxy-2'-fluoro
  misc_feature (11)..(14): 2'-deoxy-2'-fluoro
  misc_feature (16)..(16): 2'-deoxy-2'-fluoro
  misc_feature (20)..(20): Phosphorothioate 3'-Internucleotide Linkage
  misc_feature (21)..(21): n stands for thymidine
gagucuucugcucugugagnn

SEQ ID NO: 1433 - RNA, 21 nt, Artificial Sequence
  Description of Artificial Sequence:  siNA antisense region
  misc_feature (1)..(1): 2'-deoxy-2'-fluoro
  misc_feature (3)..(5): 2'-deoxy-2'-fluoro
  misc_feature (7)..(8): 2'-deoxy-2'-fluoro
  misc_feature (10)..(10): 2'-deoxy-2'-fluoro
  misc_feature (13)..(14): 2'-deoxy-2'-fluoro
  misc_feature (17)..(19): 2'-deoxy-2'-fluoro
  misc_feature (20)..(20): Phosphorothioate 3'-Internucleotide Linkage
  misc_feature (21)..(21): n stands for thymidine
ugucuguuacggucaacucnn

SEQ ID NO: 1434 - RNA, 21 nt, Artificial Sequence
  Description of Artificial Sequence:  siNA antisense region
  misc_feature (2)..(2): 2'-deoxy-2'-fluoro
  misc_feature (5)..(5): 2'-deoxy-2'-fluoro
  misc_feature (11)..(11): 2'-deoxy-2'-fluoro
  misc_feature (13)..(15): 2'-deoxy-2'-fluoro
  misc_feature (17)..(18): 2'-deoxy-2'-fluoro
  misc_feature (20)..(20): Phosphorothioate 3'-Internucleotide Linkage
  misc_feature (21)..(21): n stands for thymidine
gcagcaaagaugucuguuann

SEQ ID NO: 1435 - RNA, 21 nt, Artificial Sequence
  Description of Artificial Sequence:  siNA antisense region
  misc_feature (1)..(3): 2'-deoxy-2'-fluoro
  misc_feature (6)..(7): 2'-deoxy-2'-fluoro
  misc_feature (9)..(9): 2'-deoxy-2'-fluoro
  misc_feature (11)..(15): 2'-deoxy-2'-fluoro
  misc_feature (20)..(20): Phosphorothioate 3'-Internucleotide Linkage
  misc_feature (21)..(21): n stands for thymidine
cucaguuguguucuuggagnn

SEQ ID NO: 1436 - RNA, 21 nt, Artificial Sequence
  Description of Artificial Sequence:  siNA antisense region
  misc_feature (1)..(7): 2'-deoxy-2'-fluoro
  misc_feature (9)..(9): 2'-deoxy-2'-fluoro
  misc_feature (12)..(12): 2'-deoxy-2'-fluoro
  misc_feature (15)..(16): 2'-deoxy-2'-fluoro
  misc_feature (18)..(18): 2'-deoxy-2'-fluoro
  misc_feature (20)..(20): Phosphorothioate 3'-Internucleotide Linkage
  misc_feature (21)..(21): n stands for thymidine
ccuucucaugguggcuguann

SEQ ID NO: 1437 - RNA, 21 nt, Artificial Sequence
  Description of Artificial Sequence:  siNA antisense region
  misc_feature (1)..(4): 2'-deoxy-2'-fluoro
  misc_feature (6)..(6): 2'-deoxy-2'-fluoro
  misc_feature (11)..(11): 2'-deoxy-2'-fluoro
  misc_feature (17)..(19): 2'-deoxy-2'-fluoro
  misc_feature (20)..(20): Phosphorothioate 3'-Internucleotide Linkage
  misc_feature (21)..(21): n stands for thymidine
cuucacaggacaggaauucnn

SEQ ID NO: 1438 - RNA, 21 nt, Artificial Sequence
  Description of Artificial Sequence:  siNA antisense region
  misc_feature (2)..(2): 2'-deoxy-2'-fluoro
  misc_feature (4)..(7): 2'-deoxy-2'-fluoro
  misc_feature (10)..(11): 2'-deoxy-2'-fluoro
  misc_feature (14)..(19): 2'-deoxy-2'-fluoro
  misc_feature (20)..(20): Phosphorothioate 3'-Internucleotide Linkage
  misc_feature (21)..(21): n stands for thymidine
guacucugguuggcuuccunn

SEQ ID NO: 1439 - RNA, 21 nt, Artificial Sequence
  Description of Artificial Sequence:  siNA sense region
  misc_feature (1)..(1): 5'-3 attached terminal deoxyabasic moeity
  misc_feature (1)..(1): 2'-deoxy
  misc_feature (2)..(5): 2'-deoxy-2'-fluoro
  misc_feature (6)..(6): 2'-deoxy
  misc_feature (7)..(7): 2'-deoxy-2'-fluoro
  misc_feature (8)..(11): 2'-deoxy
  misc_feature (12)..(12): 2'-deoxy-2'-fluoro
  misc_feature (13)..(18): 2'-deoxy
  misc_feature (19)..(19): 2'-deoxy-2'-fluoro
  misc_feature (20)..(20): n stands for thymidine
  misc_feature (21)..(21): 3'-3 attached terminal deoxyabasic moeity
gccucacagagcagaagacnn

SEQ ID NO: 1440 - RNA, 21 nt, Artificial Sequence
  Description of Artificial Sequence:  siNA sense region
  misc_feature (1)..(1): 5'-3 attached terminal deoxyabasic moeity
  misc_feature (1)..(3): 2'-deoxy-2'-fluoro
  misc_feature (4)..(4): 2'-deoxy
  misc_feature (5)..(5): 2'-deoxy-2'-fluoro
  misc_feature (6)..(9): 2'-deoxy
  misc_feature (10)..(10): 2'-deoxy-2'-fluoro
  misc_feature (11)..(16): 2'-deoxy
  misc_feature (17)..(19): 2'-deoxy-2'-fluoro
  misc_feature (20)..(20): n stands for thymidine
  misc_feature (21)..(21): 3'-3 attached terminal deoxyabasic moeity
cucacagagcagaagacucnn

SEQ ID NO: 1441 - RNA, 21 nt, Artificial Sequence
  Description of Artificial Sequence:  siNA sense region
  misc_feature (1)..(1): 5'-3 attached terminal deoxyabasic moeity
  misc_feature (1)..(3): 2'-deoxy
  misc_feature (4)..(5): 2'-deoxy-2'-fluoro
  misc_feature (6)..(7): 2'-deoxy
  misc_feature (8)..(9): 2'-deoxy-2'-fluoro
  misc_feature (10)..(10): 2'-deoxy
  misc_feature (11)..(11): 2'-deoxy-2'-fluoro
  misc_feature (12)..(13): 2'-deoxy
  misc_feature (14)..(14): 2'-deoxy-2'-fluoro
  misc_feature (15)..(17): 2'-deoxy
  misc_feature (18)..(18): 2'-deoxy-2'-fluoro
  misc_feature (19)..(19): 2'-deoxy
  misc_feature (20)..(20): n stands for thymidine
  misc_feature (21)..(21): 3'-3 attached terminal deoxyabasic moeity
gaguugaccguaacagacann

SEQ ID NO: 1442 - RNA, 21 nt, Artificial Sequence
  Description of Artificial Sequence:  siNA sense region
  misc_feature (1)..(1): 5'-3 attached terminal deoxyabasic moeity
  misc_feature (1)..(1): 2'-deoxy-2'-fluoro
  misc_feature (2)..(3): 2'-deoxy
  misc_feature (4)..(4): 2'-deoxy-2'-fluoro
  misc_feature (5)..(7): 2'-deoxy
  misc_feature (8)..(8): 2'-deoxy-2'-fluoro
  misc_feature (9)..(9): 2'-deoxy
  misc_feature (10)..(14): 2'-deoxy-2'-fluoro
  misc_feature (15)..(15): 2'-deoxy
  misc_feature (16)..(17): 2'-deoxy-2'-fluoro
  misc_feature (18)..(18): 2'-deoxy
  misc_feature (19)..(19): 2'-deoxy-2'-fluoro
  misc_feature (20)..(20): n stands for thymidine
  misc_feature (21)..(21): 3'-3 attached terminal deoxyabasic moeity
uaacagacaucuuugcugcnn

SEQ ID NO: 1443 - RNA, 21 nt, Artificial Sequence
  Description of Artificial Sequence:  siNA sense region
  misc_feature (1)..(1): 5'-3 attached terminal deoxyabasic moeity
  misc_feature (1)..(4): 2'-deoxy-2'-fluoro
  misc_feature (5)..(9): 2'-deoxy
  misc_feature (10)..(10): 2'-deoxy-2'-fluoro
  misc_feature (11)..(11): 2'-deoxy
  misc_feature (12)..(12): 2'-deoxy-2'-fluoro
  misc_feature (13)..(14): 2'-deoxy
  misc_feature (15)..(16): 2'-deoxy-2'-fluoro
  misc_feature (17)..(19): 2'-deoxy
  misc_feature (20)..(20): n stands for thymidine
  misc_feature (21)..(21): 3'-3 attached terminal deoxyabasic moeity
cuccaagaacacaacugagnn

SEQ ID NO: 1444 - RNA, 21 nt, Artificial Sequence
  Description of Artificial Sequence:  siNA sense region
  misc_feature (1)..(1): 5'-3 attached terminal deoxyabasic moeity
  misc_feature (1)..(1): 2'-deoxy-2'-fluoro
  misc_feature (2)..(2): 2'-deoxy
  misc_feature (3)..(3): 2'-deoxy-2'-fluoro
  misc_feature (4)..(5): 2'-deoxy
  misc_feature (6)..(7): 2'-deoxy-2'-fluoro
  misc_feature (8)..(8): 2'-deoxy
  misc_feature (9)..(10): 2'-deoxy-2'-fluoro
  misc_feature (11)..(11): 2'-deoxy
  misc_feature (12)..(12): 2'-deoxy-2'-fluoro
  misc_feature (13)..(19): 2'-deoxy
  misc_feature (20)..(20): n stands for thymidine
  misc_feature (21)..(21): 3'-3 attached terminal deoxyabasic moeity
uacagccaccaugagaaggnn

SEQ ID NO: 1445 - RNA, 21 nt, Artificial Sequence
  Description of Artificial Sequence:  siNA sense region
  misc_feature (1)..(1): 5'-3 attached terminal deoxyabasic moeity
  misc_feature (1)..(3): 2'-deoxy
  misc_feature (4)..(8): 2'-deoxy-2'-fluoro
  misc_feature (9)..(9): 2'-deoxy
  misc_feature (10)..(13): 2'-deoxy-2'-fluoro
  misc_feature (14)..(14): 2'-deoxy
  misc_feature (15)..(15): 2'-deoxy-2'-fluoro
  misc_feature (16)..(19): 2'-deoxy
  misc_feature (20)..(20): n stands for thymidine
  misc_feature (21)..(21): 3'-3 attached terminal deoxyabasic moeity
gaauuccuguccugugaagnn

SEQ ID NO: 1446 - RNA, 21 nt, Artificial Sequence
  Description of Artificial Sequence:  siNA sense region
  misc_feature (1)..(1): 5'-3 attached terminal deoxyabasic moeity
  misc_feature (1)..(6): 2'-deoxy
  misc_feature (7)..(8): 2'-deoxy-2'-fluoro
  misc_feature (9)..(10): 2'-deoxy
  misc_feature (11)..(12): 2'-deoxy-2'-fluoro
  misc_feature (13)..(16): 2'-deoxy
  misc_feature (17)..(17): 2'-deoxy-2'-fluoro
  misc_feature (18)..(18): 2'-deoxy
  misc_feature (19)..(19): 2'-deoxy-2'-fluoro
  misc_feature (20)..(20): n stands for thymidine
  misc_feature (21)..(21): 3'-3 attached terminal deoxyabasic moeity
aggaagccaaccagaguacnn

SEQ ID NO: 1447 - RNA, 21 nt, Artificial Sequence
  Description of Artificial Sequence:  siNA antisense region
  misc_feature (1)..(1): 2'-deoxy
  misc_feature (2)..(7): 2'-deoxy-2'-fluoro
  misc_feature (8)..(8): 2'-deoxy
  misc_feature (9)..(12): 2'-deoxy-2'-fluoro
  misc_feature (13)..(13): 2'-deoxy
  misc_feature (14)..(14): 2'-deoxy-2'-fluoro
  misc_feature (15)..(18): 2'-deoxy
  misc_feature (19)..(19): 2'-deoxy-2'-fluoro
  misc_feature (20)..(20): Phosphorothioate 3'-Internucleotide Linkage
  misc_feature (21)..(21): n stands for thymidine
gucuucugcucugugaggcnn

SEQ ID NO: 1448 - RNA, 21 nt, Artificial Sequence
  Description of Artificial Sequence:  siNA antisense region
  misc_feature (1)..(3): 2'-deoxy
  misc_feature (4)..(9): 2'-deoxy-2'-fluoro
  misc_feature (10)..(10): 2'-deoxy
  misc_feature (11)..(14): 2'-deoxy-2'-fluoro
  misc_feature (15)..(15): 2'-deoxy
  misc_feature (16)..(16): 2'-deoxy-2'-fluoro
  misc_feature (17)..(19): 2'-deoxy
  misc_feature (20)..(20): Phosphorothioate 3'-Internucleotide Linkage
  misc_feature (21)..(21): n stands for thymidine
gagucuucugcucugugagnn

SEQ ID NO: 1449 - RNA, 21 nt, Artificial Sequence
  Description of Artificial Sequence:  siNA antisense region
  misc_feature (1)..(1): 2'-deoxy-2'-fluoro
  misc_feature (2)..(2): 2'-deoxy
  misc_feature (3)..(5): 2'-deoxy-2'-fluoro
  misc_feature (6)..(6): 2'-deoxy
  misc_feature (7)..(8): 2'-deoxy-2'-fluoro
  misc_feature (9)..(9): 2'-deoxy
  misc_feature (10)..(10): 2'-deoxy-2'-fluoro
  misc_feature (11)..(12): 2'-deoxy
  misc_feature (13)..(14): 2'-deoxy-2'-fluoro
  misc_feature (15)..(16): 2'-deoxy
  misc_feature (17)..(19): 2'-deoxy-2'-fluoro
  misc_feature (20)..(20): Phosphorothioate 3'-Internucleotide Linkage
  misc_feature (21)..(21): n stands for thymidine
ugucuguuacggucaacucnn

SEQ ID NO: 1450 - RNA, 21 nt, Artificial Sequence
  Description of Artificial Sequence:  siNA antisense region
  misc_feature (1)..(1): 2'-deoxy
  misc_feature (2)..(2): 2'-deoxy-2'-fluoro
  misc_feature (3)..(4): 2'-deoxy
  misc_feature (5)..(5): 2'-deoxy-2'-fluoro
  misc_feature (6)..(10): 2'-deoxy
  misc_feature (11)..(11): 2'-deoxy-2'-fluoro
  misc_feature (12)..(12): 2'-deoxy
  misc_feature (13)..(15): 2'-deoxy-2'-fluoro
  misc_feature (16)..(16): 2'-deoxy
  misc_feature (17)..(18): 2'-deoxy-2'-fluoro
  misc_feature (19)..(19): 2'-deoxy
  misc_feature (20)..(20): Phosphorothioate 3'-Internucleotide Linkage
  misc_feature (21)..(21): n stands for thymidine
gcagcaaagaugucuguuann

SEQ ID NO: 1451 - RNA, 21 nt, Artificial Sequence
  Description of Artificial Sequence:  siNA antisense region
  misc_feature (1)..(3): 2'-deoxy-2'-fluoro
  misc_feature (4)..(5): 2'-deoxy
  misc_feature (6)..(7): 2'-deoxy-2'-fluoro
  misc_feature (8)..(8): 2'-deoxy
  misc_feature (9)..(9): 2'-deoxy-2'-fluoro
  misc_feature (10)..(10): 2'-deoxy
  misc_feature (11)..(15): 2'-deoxy-2'-fluoro
  misc_feature (16)..(19): 2'-deoxy
  misc_feature (20)..(20): Phosphorothioate 3'-Internucleotide Linkage
  misc_feature (21)..(21): n stands for thymidine
cucaguuguguucuuggagnn

SEQ ID NO: 1452 - RNA, 21 nt, Artificial Sequence
  Description of Artificial Sequence:  siNA antisense region
  misc_feature (1)..(7): 2'-deoxy-2'-fluoro
  misc_feature (8)..(8): 2'-deoxy
  misc_feature (9)..(9): 2'-deoxy-2'-fluoro
  misc_feature (10)..(11): 2'-deoxy
  misc_feature (12)..(12): 2'-deoxy-2'-fluoro
  misc_feature (13)..(14): 2'-deoxy
  misc_feature (15)..(16): 2'-deoxy-2'-fluoro
  misc_feature (17)..(17): 2'-deoxy
  misc_feature (18)..(18): 2'-deoxy-2'-fluoro
  misc_feature (19)..(19): 2'-deoxy
  misc_feature (20)..(20): Phosphorothioate 3'-Internucleotide Linkage
  misc_feature (21)..(21): n stands for thymidine
ccuucucaugguggcuguann

SEQ ID NO: 1453 - RNA, 21 nt, Artificial Sequence
  Description of Artificial Sequence:  siNA antisense region
  misc_feature (1)..(4): 2'-deoxy-2'-fluoro
  misc_feature (5)..(5): 2'-deoxy
  misc_feature (6)..(6): 2'-deoxy-2'-fluoro
  misc_feature (7)..(10): 2'-deoxy
  misc_feature (11)..(11): 2'-deoxy-2'-fluoro
  misc_feature (12)..(16): 2'-deoxy
  misc_feature (17)..(19): 2'-deoxy-2'-fluoro
  misc_feature (20)..(20): Phosphorothioate 3'-Internucleotide Linkage
  misc_feature (21)..(21): n stands for thymidine
cuucacaggacaggaauucnn

SEQ ID NO: 1454 - RNA, 21 nt, Artificial Sequence
  Description of Artificial Sequence:  siNA antisense region
  misc_feature (1)..(1): 2'-deoxy
  misc_feature (2)..(2): 2'-deoxy-2'-fluoro
  misc_feature (3)..(3): 2'-deoxy
  misc_feature (4)..(7): 2'-deoxy-2'-fluoro
  misc_feature (8)..(9): 2'-deoxy
  misc_feature (10)..(11): 2'-deoxy-2'-fluoro
  misc_feature (12)..(13): 2'-deoxy
  misc_feature (14)..(19): 2'-deoxy-2'-fluoro
  misc_feature (20)..(20): Phosphorothioate 3'-Internucleotide Linkage
  misc_feature (21)..(21): n stands for thymidine
guacucugguuggcuuccunn

SEQ ID NO: 1455 - RNA, 21 nt, Artificial Sequence
  Description of Artificial Sequence:  siNA sense region
  misc_feature (1)..(1): 5'-3 attached terminal deoxyabasic moeity
  misc_feature (1)..(1): 2'-O-methyl
  misc_feature (2)..(5): 2'-deoxy-2'-fluoro
  misc_feature (6)..(6): 2'-O-methyl
  misc_feature (7)..(7): 2'-deoxy-2'-fluoro
  misc_feature (8)..(11): 2'-O-methyl
  misc_feature (12)..(12): 2'-deoxy-2'-fluoro
  misc_feature (13)..(18): 2'-O-methyl
  misc_feature (19)..(19): 2'-deoxy-2'-fluoro
  misc_feature (20)..(20): n stands for thymidine
  misc_feature (21)..(21): 3'-3 attached terminal deoxyabasic moeity
gccucacagagcagaagacnn

SEQ ID NO: 1456 - RNA, 21 nt, Artificial Sequence
  Description of Artificial Sequence:  siNA sense region
  misc_feature (1)..(1): 5'-3 attached terminal deoxyabasic moeity
  misc_feature (1)..(3): 2'-deoxy-2'-fluoro
  misc_feature (4)..(4): 2'-O-methyl
  misc_feature (5)..(5): 2'-deoxy-2'-fluoro
  misc_feature (6)..(9): 2'-O-methyl
  misc_feature (10)..(10): 2'-deoxy-2'-fluoro
  misc_feature (11)..(16): 2'-O-methyl
  misc_feature (17)..(19): 2'-deoxy-2'-fluoro
  misc_feature (20)..(20): n stands for thymidine
  misc_feature (21)..(21): 3'-3 attached terminal deoxyabasic moeity
cucacagagcagaagacucnn

SEQ ID NO: 1457 - RNA, 21 nt, Artificial Sequence
  Description of Artificial Sequence:  siNA sense region
  misc_feature (1)..(1): 5'-3 attached terminal deoxyabasic moeity
  misc_feature (1)..(3): 2'-O-methyl
  misc_feature (4)..(5): 2'-deoxy-2'-fluoro
  misc_feature (6)..(7): 2'-O-methyl
  misc_feature (8)..(9): 2'-deoxy-2'-fluoro
  misc_feature (10)..(10): 2'-O-methyl
  misc_feature (11)..(11): 2'-deoxy-2'-fluoro
  misc_feature (12)..(13): 2'-O-methyl
  misc_feature (14)..(14): 2'-deoxy-2'-fluoro
  misc_feature (15)..(17): 2'-O-methyl
  misc_feature (18)..(18): 2'-deoxy-2'-fluoro
  misc_feature (19)..(19): 2'-O-methyl
  misc_feature (20)..(20): n stands for thymidine
  misc_feature (21)..(21): 3'-3 attached terminal deoxyabasic moeity
gaguugaccguaacagacann

SEQ ID NO: 1458 - RNA, 21 nt, Artificial Sequence
  Description of Artificial Sequence:  siNA sense region
  misc_feature (1)..(1): 5'-3 attached terminal deoxyabasic moeity
  misc_feature (1)..(1): 2'-deoxy-2'-fluoro
  misc_feature (2)..(3): 2'-O-methyl
  misc_feature (4)..(4): 2'-deoxy-2'-fluoro
  misc_feature (5)..(7): 2'-O-methyl
  misc_feature (8)..(8): 2'-deoxy-2'-fluoro
  misc_feature (9)..(9): 2'-O-methyl
  misc_feature (10)..(14): 2'-deoxy-2'-fluoro
  misc_feature (15)..(15): 2'-O-methyl
  misc_feature (16)..(17): 2'-deoxy-2'-fluoro
  misc_feature (18)..(18): 2'-O-methyl
  misc_feature (19)..(19): 2'-deoxy-2'-fluoro
  misc_feature (20)..(20): n stands for thymidine
  misc_feature (21)..(21): 3'-3 attached terminal deoxyabasic moeity
uaacagacaucuuugcugcnn

SEQ ID NO: 1459 - RNA, 21 nt, Artificial Sequence
  Description of Artificial Sequence:  siNA sense region
  misc_feature (1)..(1): 5'-3 attached terminal deoxyabasic moeity
  misc_feature (1)..(4): 2'-deoxy-2'-fluoro
  misc_feature (5)..(9): 2'-O-methyl
  misc_feature (10)..(10): 2'-deoxy-2'-fluoro
  misc_feature (11)..(11): 2'-O-methyl
  misc_feature (12)..(12): 2'-deoxy-2'-fluoro
  misc_feature (13)..(14): 2'-O-methyl
  misc_feature (15)..(16): 2'-deoxy-2'-fluoro
  misc_feature (17)..(19): 2'-O-methyl
  misc_feature (20)..(20): n stands for thymidine
  misc_feature (21)..(21): 3'-3 attached terminal deoxyabasic moeity
cuccaagaacacaacugagnn

SEQ ID NO: 1460 - RNA, 21 nt, Artificial Sequence
  Description of Artificial Sequence:  siNA sense region
  misc_feature (1)..(1): 5'-3 attached terminal deoxyabasic moeity
  misc_feature (1)..(1): 2'-deoxy-2'-fluoro
  misc_feature (2)..(2): 2'-O-methyl
  misc_feature (3)..(3): 2'-deoxy-2'-fluoro
  misc_feature (4)..(5): 2'-O-methyl
  misc_feature (6)..(7): 2'-deoxy-2'-fluoro
  misc_feature (8)..(8): 2'-O-methyl
  misc_feature (9)..(10): 2'-deoxy-2'-fluoro
  misc_feature (11)..(11): 2'-O-methyl
  misc_feature (12)..(12): 2'-deoxy-2'-fluoro
  misc_feature (13)..(19): 2'-O-methyl
  misc_feature (20)..(20): n stands for thymidine
  misc_feature (21)..(21): 3'-3 attached terminal deoxyabasic moeity
uacagccaccaugagaaggnn

SEQ ID NO: 1461 - RNA, 21 nt, Artificial Sequence
  Description of Artificial Sequence:  siNA sense region
  misc_feature (1)..(1): 5'-3 attached terminal deoxyabasic moeity
  misc_feature (1)..(3): 2'-O-methyl
  misc_feature (4)..(8): 2'-deoxy-2'-fluoro
  misc_feature (9)..(9): 2'-O-methyl
  misc_feature (10)..(13): 2'-deoxy-2'-fluoro
  misc_feature (14)..(14): 2'-O-methyl
  misc_feature (15)..(15): 2'-deoxy-2'-fluoro
  misc_feature (16)..(19): 2'-O-methyl
  misc_feature (20)..(20): n stands for thymidine
  misc_feature (21)..(21): 3'-3 attached terminal deoxyabasic moeity
gaauuccuguccugugaagnn

SEQ ID NO: 1462 - RNA, 21 nt, Artificial Sequence
  Description of Artificial Sequence:  siNA sense region
  misc_feature (1)..(1): 5'-3 attached terminal deoxyabasic moeity
  misc_feature (1)..(6): 2'-O-methyl
  misc_feature (7)..(8): 2'-deoxy-2'-fluoro
  misc_feature (9)..(10): 2'-O-methyl
  misc_feature (11)..(12): 2'-deoxy-2'-fluoro
  misc_feature (13)..(16): 2'-O-methyl
  misc_feature (17)..(17): 2'-deoxy-2'-fluoro
  misc_feature (18)..(18): 2'-O-methyl
  misc_feature (19)..(19): 2'-deoxy-2'-fluoro
  misc_feature (20)..(20): n stands for thymidine
  misc_feature (21)..(21): 3'-3 attached terminal deoxyabasic moeity
aggaagccaaccagaguacnn

SEQ ID NO: 1463 - RNA, 21 nt, Artificial Sequence
  Description of Artificial Sequence:  siNA antisense region
  misc_feature (1)..(1): 2'-O-methyl
  misc_feature (2)..(7): 2'-deoxy-2'-fluoro
  misc_feature (8)..(8): 2'-O-methyl
  misc_feature (9)..(12): 2'-deoxy-2'-fluoro
  misc_feature (13)..(13): 2'-O-methyl
  misc_feature (14)..(14): 2'-deoxy-2'-fluoro
  misc_feature (15)..(19): 2'-O-methyl
  misc_feature (19)..(19): 2'-deoxy-2'-fluoro
  misc_feature (20)..(20): Phosphorothioate 3'-Internucleotide Linkage
  misc_feature (21)..(21): n stands for thymidine
gucuucugcucugugaggcnn

SEQ ID NO: 1464 - RNA, 21 nt, Artificial Sequence
  Description of Artificial Sequence:  siNA antisense region
  misc_feature (1)..(3): 2'-O-methyl
  misc_feature (4)..(9): 2'-deoxy-2'-fluoro
  misc_feature (10)..(10): 2'-O-methyl
  misc_feature (11)..(14): 2'-deoxy-2'-fluoro
  misc_feature (15)..(19): 2'-O-methyl
  misc_feature (16)..(16): 2'-deoxy-2'-fluoro
  misc_feature (20)..(20): Phosphorothioate 3'-Internucleotide Linkage
  misc_feature (21)..(21): n stands for thymidine
gagucuucugcucugugagnn

SEQ ID NO: 1465 - RNA, 21 nt, Artificial Sequence
  Description of Artificial Sequence:  siNA antisense region
  misc_feature (1)..(1): 2'-deoxy-2'-fluoro
  misc_feature (2)..(2): 2'-O-methyl
  misc_feature (3)..(5): 2'-deoxy-2'-fluoro
  misc_feature (6)..(6): 2'-O-methyl
  misc_feature (7)..(8): 2'-deoxy-2'-fluoro
  misc_feature (9)..(9): 2'-O-methyl
  misc_feature (10)..(10): 2'-deoxy-2'-fluoro
  misc_feature (11)..(12): 2'-O-methyl
  misc_feature (13)..(14): 2'-deoxy-2'-fluoro
  misc_feature (15)..(16): 2'-O-methyl
  misc_feature (17)..(19): 2'-deoxy-2'-fluoro
  misc_feature (20)..(20): Phosphorothioate 3'-Internucleotide Linkage
  misc_feature (21)..(21): n stands for thymidine
ugucuguuacggucaacucnn

SEQ ID NO: 1466 - RNA, 21 nt, Artificial Sequence
  Description of Artificial Sequence:  siNA antisense region
  misc_feature (1)..(1): 2'-O-methyl
  misc_feature (2)..(2): 2'-deoxy-2'-fluoro
  misc_feature (3)..(4): 2'-O-methyl
  misc_feature (5)..(5): 2'-deoxy-2'-fluoro
  misc_feature (6)..(10): 2'-O-methyl
  misc_feature (11)..(11): 2'-deoxy-2'-fluoro
  misc_feature (12)..(12): 2'-O-methyl
  misc_feature (13)..(15): 2'-deoxy-2'-fluoro
  misc_feature (16)..(16): 2'-O-methyl
  misc_feature (17)..(18): 2'-deoxy-2'-fluoro
  misc_feature (19)..(19): 2'-O-methyl
  misc_feature (20)..(20): Phosphorothioate 3'-Internucleotide Linkage
  misc_feature (21)..(21): n stands for thymidine
gcagcaaagaugucuguuann

SEQ ID NO: 1467 - RNA, 21 nt, Artificial Sequence
  Description of Artificial Sequence:  siNA antisense region
  misc_feature (1)..(3): 2'-deoxy-2'-fluoro
  misc_feature (4)..(5): 2'-O-methyl
  misc_feature (6)..(7): 2'-deoxy-2'-fluoro
  misc_feature (8)..(8): 2'-O-methyl
  misc_feature (9)..(9): 2'-deoxy-2'-fluoro
  misc_feature (10)..(10): 2'-O-methyl
  misc_feature (11)..(15): 2'-deoxy-2'-fluoro
  misc_feature (16)..(19): 2'-O-methyl
  misc_feature (20)..(20): Phosphorothioate 3'-Internucleotide Linkage
  misc_feature (21)..(21): n stands for thymidine
cucaguuguguucuuggagnn

SEQ ID NO: 1468 - RNA, 21 nt, Artificial Sequence
  Description of Artificial Sequence:  siNA antisense region
  misc_feature (1)..(7): 2'-deoxy-2'-fluoro
  misc_feature (8)..(8): 2'-O-methyl
  misc_feature (9)..(9): 2'-deoxy-2'-fluoro
  misc_feature (10)..(11): 2'-O-methyl
  misc_feature (12)..(12): 2'-deoxy-2'-fluoro
  misc_feature (13)..(14): 2'-O-methyl
  misc_feature (15)..(16): 2'-deoxy-2'-fluoro
  misc_feature (17)..(17): 2'-O-methyl
  misc_feature (18)..(18): 2'-deoxy-2'-fluoro
  misc_feature (19)..(19): 2'-O-methyl
  misc_feature (20)..(20): Phosphorothioate 3'-Internucleotide Linkage
  misc_feature (21)..(21): n stands for thymidine
ccuucucaugguggcuguann

SEQ ID NO: 1469 - RNA, 21 nt, Artificial Sequence
  Description of Artificial Sequence:  siNA antisense region
  misc_feature (1)..(4): 2'-deoxy-2'-fluoro
  misc_feature (5)..(5): 2'-O-methyl
  misc_feature (6)..(6): 2'-deoxy-2'-fluoro
  misc_feature (7)..(10): 2'-O-methyl
  misc_feature (11)..(11): 2'-deoxy-2'-fluoro
  misc_feature (12)..(16): 2'-O-methyl
  misc_feature (17)..(19): 2'-deoxy-2'-fluoro
  misc_feature (20)..(20): Phosphorothioate 3'-Internucleotide Linkage
  misc_feature (21)..(21): n stands for thymidine
cuucacaggacaggaauucnn

SEQ ID NO: 1470 - RNA, 21 nt, Artificial Sequence
  Description of Artificial Sequence:  siNA antisense region
  misc_feature (1)..(1): 2'-O-methyl
  misc_feature (2)..(2): 2'-deoxy-2'-fluoro
  misc_feature (3)..(3): 2'-O-methyl
  misc_feature (4)..(7): 2'-deoxy-2'-fluoro
  misc_feature (8)..(9): 2'-O-methyl
  misc_feature (10)..(11): 2'-deoxy-2'-fluoro
  misc_feature (12)..(13): 2'-O-methyl
  misc_feature (14)..(19): 2'-deoxy-2'-fluoro
  misc_feature (20)..(20): Phosphorothioate 3'-Internucleotide Linkage
  misc_feature (21)..(21): n stands for thymidine
guacucugguuggcuuccunn

SEQ ID NO: 1471 - RNA, 21 nt, Artificial Sequence
  Description of Artificial Sequence:  siNA sense region
  misc_feature (1)..(1): 5'-3 attached terminal deoxyabasic moeity
  misc_feature (20)..(20): n stands for thymidine
  misc_feature (21)..(21): 3'-3 attached terminal deoxyabasic moeity
gccucacagagcagaagacnn

SEQ ID NO: 1472 - RNA, 21 nt, Artificial Sequence
  Description of Artificial Sequence:  siNA sense region
  misc_feature (1)..(1): 5'-3 attached terminal deoxyabasic moeity
  misc_feature (20)..(20): n stands for thymidine
  misc_feature (21)..(21): 3'-3 attached terminal deoxyabasic moeity
cucacagagcagaagacucnn

SEQ ID NO: 1473 - RNA, 21 nt, Artificial Sequence
  Description of Artificial Sequence:  siNA sense region
  misc_feature (1)..(1): 5'-3 attached terminal deoxyabasic moeity
  misc_feature (20)..(20): n stands for thymidine
  misc_feature (21)..(21): 3'-3 attached terminal deoxyabasic moeity
gaguugaccguaacagacann

SEQ ID NO: 1474 - RNA, 21 nt, Artificial Sequence
  Description of Artificial Sequence:  siNA sense region
  misc_feature (1)..(1): 5'-3 attached terminal deoxyabasic moeity
  misc_feature (20)..(20): n stands for thymidine
  misc_feature (21)..(21): 3'-3 attached terminal deoxyabasic moeity
uaacagacaucuuugcugcnn

SEQ ID NO: 1475 - RNA, 21 nt, Artificial Sequence
  Description of Artificial Sequence:  siNA sense region
  misc_feature (1)..(1): 5'-3 attached terminal deoxyabasic moeity
  misc_feature (20)..(20): n stands for thymidine
  misc_feature (21)..(21): 3'-3 attached terminal deoxyabasic moeity
cuccaagaacacaacugagnn

SEQ ID NO: 1476 - RNA, 21 nt, Artificial Sequence
  Description of Artificial Sequence:  siNA sense region
  misc_feature (1)..(1): 5'-3 attached terminal deoxyabasic moeity
  misc_feature (20)..(20): n stands for thymidine
  misc_feature (21)..(21): 3'-3 attached terminal deoxyabasic moeity
uacagccaccaugagaaggnn

SEQ ID NO: 1477 - RNA, 21 nt, Artificial Sequence
  Description of Artificial Sequence:  siNA sense region
  misc_feature (1)..(1): 5'-3 attached terminal deoxyabasic moeity
  misc_feature (20)..(20): n stands for thymidine
  misc_feature (21)..(21): 3'-3 attached terminal deoxyabasic moeity
gaauuccuguccugugaagnn

SEQ ID NO: 1478 - RNA, 21 nt, Artificial Sequence
  Description of Artificial Sequence:  siNA sense region
  misc_feature (1)..(1): 5'-3 attached terminal deoxyabasic moeity
  misc_feature (20)..(20): n stands for thymidine
  misc_feature (21)..(21): 3'-3 attached terminal deoxyabasic moeity
aggaagccaaccagaguacnn

SEQ ID NO: 1479 - RNA, 21 nt, Artificial Sequence
  Description of Artificial Sequence:  siNA antisense region
  misc_feature (20)..(20): Phosphorothioate 3'-Internucleotide Linkage
  misc_feature (21)..(21): n stands for thymidine
gucuucugcucugugaggcnn

SEQ ID NO: 1480 - RNA, 21 nt, Artificial Sequence
  Description of Artificial Sequence:  siNA antisense region
  misc_feature (20)..(20): Phosphorothioate 3'-Internucleotide Linkage
  misc_feature (21)..(21): n stands for thymidine
gagucuucugcucugugagnn

SEQ ID NO: 1481 - RNA, 21 nt, Artificial Sequence
  Description of Artificial Sequence:  siNA antisense region
  misc_feature (20)..(20): Phosphorothioate 3'-Internucleotide Linkage
  misc_feature (21)..(21): n stands for thymidine
ugucuguuacggucaacucnn

SEQ ID NO: 1482 - RNA, 21 nt, Artificial Sequence
  Description of Artificial Sequence:  siNA antisense region
  misc_feature (20)..(20): Phosphorothioate 3'-Internucleotide Linkage
  misc_feature (21)..(21): n stands for thymidine
gcagcaaagaugucuguuann

SEQ ID NO: 1483 - RNA, 21 nt, Artificial Sequence
  Description of Artificial Sequence:  siNA antisense region
  misc_feature (20)..(20): Phosphorothioate 3'-Internucleotide Linkage
  misc_feature (21)..(21): n stands for thymidine
cucaguuguguucuuggagnn

SEQ ID NO: 1484 - RNA, 21 nt, Artificial Sequence
  Description of Artificial Sequence:  siNA antisense region
  misc_feature (20)..(20): Phosphorothioate 3'-Internucleotide Linkage
  misc_feature (21)..(21): n stands for thymidine
ccuucucaugguggcuguann

SEQ ID NO: 1485 - RNA, 21 nt, Artificial Sequence
  Description of Artificial Sequence:  siNA antisense region
  misc_feature (20)..(20): Phosphorothioate 3'-Internucleotide Linkage
  misc_feature (21)..(21): n stands for thymidine
cuucacaggacaggaauucnn

SEQ ID NO: 1486 - RNA, 21 nt, Artificial Sequence
  Description of Artificial Sequence:  siNA antisense region
  misc_feature (20)..(20): Phosphorothioate 3'-Internucleotide Linkage
  misc_feature (21)..(21): n stands for thymidine
guacucugguuggcuuccunn

SEQ ID NO: 1487 - RNA, 21 nt, Artificial Sequence
  Description of Artificial Sequence:  siNA antisense region
  misc_feature (2)..(7): 2'-deoxy-2'-fluoro
  misc_feature (9)..(12): 2'-deoxy-2'-fluoro
  misc_feature (14)..(14): 2'-deoxy-2'-fluoro
  misc_feature (19)..(19): 2'-deoxy-2'-fluoro
  misc_feature (20)..(20): n stands for thymidine
  misc_feature (21)..(21): 3'-3 attached terminal deoxyabasic moeity
gucuucugcucugugaggcnn

SEQ ID NO: 1488 - RNA, 21 nt, Artificial Sequence
  Description of Artificial Sequence:  siNA antisense region
  misc_feature (4)..(9): 2'-deoxy-2'-fluoro
  misc_feature (11)..(14): 2'-deoxy-2'-fluoro
  misc_feature (16)..(16): 2'-deoxy-2'-fluoro
  misc_feature (20)..(20): n stands for thymidine
  misc_feature (21)..(21): 3'-3 attached terminal deoxyabasic moeity
gagucuucugcucugugagnn

SEQ ID NO: 1489 - RNA, 21 nt, Artificial Sequence
  Description of Artificial Sequence:  siNA antisense region
  misc_feature (1)..(1): 2'-deoxy-2'-fluoro
  misc_feature (3)..(5): 2'-deoxy-2'-fluoro
  misc_feature (7)..(8): 2'-deoxy-2'-fluoro
  misc_feature (10)..(10): 2'-deoxy-2'-fluoro
  misc_feature (13)..(14): 2'-deoxy-2'-fluoro
  misc_feature (17)..(19): 2'-deoxy-2'-fluoro
  misc_feature (20)..(20): n stands for thymidine
  misc_feature (21)..(21): 3'-3 attached terminal deoxyabasic moeity
ugucuguuacggucaacucnn

SEQ ID NO: 1490 - RNA, 21 nt, Artificial Sequence
  Description of Artificial Sequence:  siNA antisense region
  misc_feature (2)..(2): 2'-deoxy-2'-fluoro
  misc_feature (5)..(5): 2'-deoxy-2'-fluoro
  misc_feature (11)..(11): 2'-deoxy-2'-fluoro
  misc_feature (13)..(15): 2'-deoxy-2'-fluoro
  misc_feature (17)..(18): 2'-deoxy-2'-fluoro
  misc_feature (20)..(20): n stands for thymidine
  misc_feature (21)..(21): 3'-3 attached terminal deoxyabasic moeity
gcagcaaagaugucuguuann

SEQ ID NO: 1491 - RNA, 21 nt, Artificial Sequence
  Description of Artificial Sequence:  siNA antisense region
  misc_feature (1)..(3): 2'-deoxy-2'-fluoro
  misc_feature (6)..(7): 2'-deoxy-2'-fluoro
  misc_feature (9)..(9): 2'-deoxy-2'-fluoro
  misc_feature (11)..(15): 2'-deoxy-2'-fluoro
  misc_feature (20)..(20): n stands for thymidine
  misc_feature (21)..(21): 3'-3 attached terminal deoxyabasic moeity
cucaguuguguucuuggagnn

SEQ ID NO: 1492 - RNA, 21 nt, Artificial Sequence
  Description of Artificial Sequence:  siNA antisense region
  misc_feature (1)..(7): 2'-deoxy-2'-fluoro
  misc_feature (9)..(9): 2'-deoxy-2'-fluoro
  misc_feature (12)..(12): 2'-deoxy-2'-fluoro
  misc_feature (15)..(16): 2'-deoxy-2'-fluoro
  misc_feature (18)..(18): 2'-deoxy-2'-fluoro
  misc_feature (20)..(20): n stands for thymidine
  misc_feature (21)..(21): 3'-3 attached terminal deoxyabasic moeity
ccuucucaugguggcuguann

SEQ ID NO: 1493 - RNA, 21 nt, Artificial Sequence
  Description of Artificial Sequence:  siNA antisense region
  misc_feature (1)..(4): 2'-deoxy-2'-fluoro
  misc_feature (6)..(6): 2'-deoxy-2'-fluoro
  misc_feature (11)..(11): 2'-deoxy-2'-fluoro
  misc_feature (17)..(19): 2'-deoxy-2'-fluoro
  misc_feature (20)..(20): n stands for thymidine
  misc_feature (21)..(21): 3'-3 attached terminal deoxyabasic moeity
cuucacaggacaggaauucnn

SEQ ID NO: 1494 - RNA, 21 nt, Artificial Sequence
  Description of Artificial Sequence:  siNA antisense region
  misc_feature (2)..(2): 2'-deoxy-2'-fluoro
  misc_feature (4)..(7): 2'-deoxy-2'-fluoro
  misc_feature (10)..(11): 2'-deoxy-2'-fluoro
  misc_feature (14)..(19): 2'-deoxy-2'-fluoro
  misc_feature (20)..(20): n stands for thymidine
  misc_feature (21)..(21): 3'-3 attached terminal deoxyabasic moeity
guacucugguuggcuuccunn

SEQ ID NO: 1495 - RNA, 21 nt, Artificial Sequence
  Description of Artificial Sequence:  siNA antisense region
  misc_feature (20)..(20): n stands for thymidine
  misc_feature (21)..(21): 3'-3 attached terminal deoxyabasic moeity
gucuucugcucugugaggcnn

SEQ ID NO: 1496 - RNA, 21 nt, Artificial Sequence
  Description of Artificial Sequence:  siNA antisense region
  misc_feature (20)..(20): n stands for thymidine
  misc_feature (21)..(21): 3'-3 attached terminal deoxyabasic moeity
gagucuucugcucugugagnn

SEQ ID NO: 1497 - RNA, 21 nt, Artificial Sequence
  Description of Artificial Sequence:  siNA antisense region
  misc_feature (20)..(20): n stands for thymidine
  misc_feature (21)..(21): 3'-3 attached terminal deoxyabasic moeity
ugucuguuacggucaacucnn

SEQ ID NO: 1498 - RNA, 21 nt, Artificial Sequence
  Description of Artificial Sequence:  siNA antisense region
  misc_feature (20)..(20): n stands for thymidine
  misc_feature (21)..(21): 3'-3 attached terminal deoxyabasic moeity
gcagcaaagaugucuguuann

SEQ ID NO: 1499 - RNA, 21 nt, Artificial Sequence
  Description of Artificial Sequence:  siNA antisense region
  misc_feature (20)..(20): n stands for thymidine
  misc_feature (21)..(21): 3'-3 attached terminal deoxyabasic moeity
cucaguuguguucuuggagnn

SEQ ID NO: 1500 - RNA, 21 nt, Artificial Sequence
  Description of Artificial Sequence:  siNA antisense region
  misc_feature (20)..(20): n stands for thymidine
  misc_feature (21)..(21): 3'-3 attached terminal deoxyabasic moeity
ccuucucaugguggcuguann

SEQ ID NO: 1501 - RNA, 21 nt, Artificial Sequence
  Description of Artificial Sequence:  siNA antisense region
  misc_feature (20)..(20): n stands for thymidine
  misc_feature (21)..(21): 3'-3 attached terminal deoxyabasic moeity
cuucacaggacaggaauucnn

SEQ ID NO: 1502 - RNA, 21 nt, Artificial Sequence
  Description of Artificial Sequence:  siNA antisense region
  misc_feature (20)..(20): n stands for thymidine
  misc_feature (21)..(21): 3'-3 attached terminal deoxyabasic moeity
guacucugguuggcuuccunn

SEQ ID NO: 1503 - RNA, 21 nt, Artificial Sequence
  Description of Artificial Sequence:  siNA sense region
  misc_feature (20)..(21): n stands for thymidine
auacacuggaccugugggcnn

SEQ ID NO: 1504 - RNA, 21 nt, Artificial Sequence
  Description of Artificial Sequence:  siNA sense region
  misc_feature (20)..(21): n stands for thymidine
aggaaaccugacaguucacnn

SEQ ID NO: 1505 - RNA, 21 nt, Artificial Sequence
  Description of Artificial Sequence:  siNA sense region
  misc_feature (20)..(21): n stands for thymidine
cacaacaugaaaagggaugnn

SEQ ID NO: 1506 - RNA, 21 nt, Artificial Sequence
  Description of Artificial Sequence:  siNA sense region
  misc_feature (20)..(21): n stands for thymidine
acaacaugaaaagggaugann

SEQ ID NO: 1507 - RNA, 21 nt, Artificial Sequence
  Description of Artificial Sequence:  siNA sense region
  misc_feature (20)..(21): n stands for thymidine
gggaugaagauccucacaann

SEQ ID NO: 1508 - RNA, 21 nt, Artificial Sequence
  Description of Artificial Sequence:  siNA sense region
  misc_feature (20)..(21): n stands for thymidine
gggaaaucgaugagaaauunn

SEQ ID NO: 1509 - RNA, 21 nt, Artificial Sequence
  Description of Artificial Sequence:  siNA sense region
  misc_feature (20)..(21): n stands for thymidine
ggaaaucgaugagaaauugnn

SEQ ID NO: 1510 - RNA, 21 nt, Artificial Sequence
  Description of Artificial Sequence:  siNA sense region
  misc_feature (20)..(21): n stands for thymidine
auugccuagaggugcucaunn

SEQ ID NO: 1511 - RNA, 21 nt, Artificial Sequence
  Description of Artificial Sequence:  siNA antisense region
  misc_feature (20)..(21): n stands for thymidine
gcccacagguccaguguaunn

SEQ ID NO: 1512 - RNA, 21 nt, Artificial Sequence
  Description of Artificial Sequence:  siNA antisense region
  misc_feature (20)..(21): n stands for thymidine
gugaacugucagguuuccunn

SEQ ID NO: 1513 - RNA, 21 nt, Artificial Sequence
  Description of Artificial Sequence:  siNA antisense region
  misc_feature (20)..(21): n stands for thymidine
caucccuuuucauguugugnn

SEQ ID NO: 1514 - RNA, 21 nt, Artificial Sequence
  Description of Artificial Sequence:  siNA antisense region
  misc_feature (20)..(21): n stands for thymidine
ucaucccuuuucauguugunn

SEQ ID NO: 1515 - RNA, 21 nt, Artificial Sequence
  Description of Artificial Sequence:  siNA antisense region
  misc_feature (20)..(21): n stands for thymidine
uugugaggaucuucaucccnn

SEQ ID NO: 1516 - RNA, 21 nt, Artificial Sequence
  Description of Artificial Sequence:  siNA antisense region
  misc_feature (20)..(21): n stands for thymidine
aauuucucaucgauuucccnn

SEQ ID NO: 1517 - RNA, 21 nt, Artificial Sequence
  Description of Artificial Sequence:  siNA antisense region
  misc_feature (20)..(21): n stands for thymidine
caauuucucaucgauuuccnn

SEQ ID NO: 1518 - RNA, 21 nt, Artificial Sequence
  Description of Artificial Sequence:  siNA antisense region
  misc_feature (20)..(21): n stands for thymidine
augagcaccucuaggcaaunn

SEQ ID NO: 1519 - RNA, 21 nt, Artificial Sequence
  Description of Artificial Sequence:  siNA sense region
  misc_feature (1)..(1): 5'-3 attached terminal deoxyabasic moeity
  misc_feature (2)..(2): 2'-deoxy-2'-fluoro
  misc_feature (4)..(4): 2'-deoxy-2'-fluoro
  misc_feature (6)..(7): 2'-deoxy-2'-fluoro
  misc_feature (11)..(13): 2'-deoxy-2'-fluoro
  misc_feature (15)..(15): 2'-deoxy-2'-fluoro
  misc_feature (19)..(19): 2'-deoxy-2'-fluoro
  misc_feature (20)..(20): n stands for thymidine
  misc_feature (21)..(21): 3'-3 attached terminal deoxyabasic moeity
auacacuggaccugugggcnn

SEQ ID NO: 1520 - RNA, 21 nt, Artificial Sequence
  Description of Artificial Sequence:  siNA sense region
  misc_feature (1)..(1): 5'-3 attached terminal deoxyabasic moeity
  misc_feature (7)..(9): 2'-deoxy-2'-fluoro
  misc_feature (12)..(12): 2'-deoxy-2'-fluoro
  misc_feature (15)..(17): 2'-deoxy-2'-fluoro
  misc_feature (19)..(19): 2'-deoxy-2'-fluoro
  misc_feature (20)..(20): n stands for thymidine
  misc_feature (21)..(21): 3'-3 attached terminal deoxyabasic moeity
aggaaaccugacaguucacnn

SEQ ID NO: 1521 - RNA, 21 nt, Artificial Sequence
  Description of Artificial Sequence:  siNA sense region
  misc_feature (1)..(1): 5'-3 attached terminal deoxyabasic moeity
  misc_feature (1)..(1): 2'-deoxy-2'-fluoro
  misc_feature (3)..(3): 2'-deoxy-2'-fluoro
  misc_feature (6)..(6): 2'-deoxy-2'-fluoro
  misc_feature (8)..(8): 2'-deoxy-2'-fluoro
  misc_feature (18)..(18): 2'-deoxy-2'-fluoro
  misc_feature (20)..(20): n stands for thymidine
  misc_feature (21)..(21): 3'-3 attached terminal deoxyabasic moeity
cacaacaugaaaagggaugnn

SEQ ID NO: 1522 - RNA, 21 nt, Artificial Sequence
  Description of Artificial Sequence:  siNA sense region
  misc_feature (1)..(1): 5'-3 attached terminal deoxyabasic moeity
  misc_feature (2)..(2): 2'-deoxy-2'-fluoro
  misc_feature (5)..(5): 2'-deoxy-2'-fluoro
  misc_feature (7)..(7): 2'-deoxy-2'-fluoro
  misc_feature (17)..(17): 2'-deoxy-2'-fluoro
  misc_feature (20)..(20): n stands for thymidine
  misc_feature (21)..(21): 3'-3 attached terminal deoxyabasic moeity
acaacaugaaaagggaugann

SEQ ID NO: 1523 - RNA, 21 nt, Artificial Sequence
  Description of Artificial Sequence:  siNA sense region
  misc_feature (1)..(1): 5'-3 attached terminal deoxyabasic moeity
  misc_feature (5)..(5): 2'-deoxy-2'-fluoro
  misc_feature (11)..(15): 2'-deoxy-2'-fluoro
  misc_feature (17)..(17): 2'-deoxy-2'-fluoro
  misc_feature (20)..(20): n stands for thymidine
  misc_feature (21)..(21): 3'-3 attached terminal deoxyabasic moeity
gggaugaagauccucacaann

SEQ ID NO: 1524 - RNA, 21 nt, Artificial Sequence
  Description of Artificial Sequence:  siNA sense region
  misc_feature (1)..(1): 5'-3 attached terminal deoxyabasic moeity
  misc_feature (7)..(8): 2'-deoxy-2'-fluoro
  misc_feature (11)..(11): 2'-deoxy-2'-fluoro
  misc_feature (18)..(19): 2'-deoxy-2'-fluoro
  misc_feature (20)..(20): n stands for thymidine
  misc_feature (21)..(21): 3'-3 attached terminal deoxyabasic moeity
gggaaaucgaugagaaauunn

SEQ ID NO: 1525 - RNA, 21 nt, Artificial Sequence
  Description of Artificial Sequence:  siNA sense region
  misc_feature (1)..(1): 5'-3 attached terminal deoxyabasic moeity
  misc_feature (6)..(7): 2'-deoxy-2'-fluoro
  misc_feature (10)..(10): 2'-deoxy-2'-fluoro
  misc_feature (17)..(18): 2'-deoxy-2'-fluoro
  misc_feature (20)..(20): n stands for thymidine
  misc_feature (21)..(21): 3'-3 attached terminal deoxyabasic moeity
ggaaaucgaugagaaauugnn

SEQ ID NO: 1526 - RNA, 21 nt, Artificial Sequence
  Description of Artificial Sequence:  siNA sense region
  misc_feature (1)..(1): 5'-3 attached terminal deoxyabasic moeity
  misc_feature (2)..(3): 2'-deoxy-2'-fluoro
  misc_feature (5)..(7): 2'-deoxy-2'-fluoro
  misc_feature (13)..(13): 2'-deoxy-2'-fluoro
  misc_feature (15)..(17): 2'-deoxy-2'-fluoro
  misc_feature (19)..(19): 2'-deoxy-2'-fluoro
  misc_feature (20)..(20): n stands for thymidine
  misc_feature (21)..(21): 3'-3 attached terminal deoxyabasic moeity
auugccuagaggugcucaunn

SEQ ID NO: 1527 - RNA, 21 nt, Artificial Sequence
  Description of Artificial Sequence:  siNA antisense region
  misc_feature (2)..(4): 2'-deoxy-2'-fluoro
  misc_feature (6)..(6): 2'-deoxy-2'-fluoro
  misc_feature (10)..(12): 2'-deoxy-2'-fluoro
  misc_feature (15)..(15): 2'-deoxy-2'-fluoro
  misc_feature (17)..(17): 2'-deoxy-2'-fluoro
  misc_feature (19)..(19): 2'-deoxy-2'-fluoro
  misc_feature (20)..(20): Phosphorothioate 3'-Internucleotide Linkage
  misc_feature (21)..(21): n stands for thymidine
gcccacagguccaguguaunn

SEQ ID NO: 1528 - RNA, 21 nt, Artificial Sequence
  Description of Artificial Sequence:  siNA antisense region
  misc_feature (2)..(2): 2'-deoxy-2'-fluoro
  misc_feature (6)..(7): 2'-deoxy-2'-fluoro
  misc_feature (9)..(10): 2'-deoxy-2'-fluoro
  misc_feature (14)..(19): 2'-deoxy-2'-fluoro
  misc_feature (20)..(20): Phosphorothioate 3'-Internucleotide Linkage
  misc_feature (21)..(21): n stands for thymidine
gugaacugucagguuuccunn

SEQ ID NO: 1529 - RNA, 21 nt, Artificial Sequence
  Description of Artificial Sequence:  siNA antisense region
  misc_feature (1)..(1): 2'-deoxy-2'-fluoro
  misc_feature (3)..(11): 2'-deoxy-2'-fluoro
  misc_feature (13)..(13): 2'-deoxy-2'-fluoro
  misc_feature (15)..(16): 2'-deoxy-2'-fluoro
  misc_feature (18)..(18): 2'-deoxy-2'-fluoro
  misc_feature (20)..(20): Phosphorothioate 3'-Internucleotide Linkage
  misc_feature (21)..(21): n stands for thymidine
caucccuuuucauguugugnn

SEQ ID NO: 1530 - RNA, 21 nt, Artificial Sequence
  Description of Artificial Sequence:  siNA antisense region
  misc_feature (1)..(2): 2'-deoxy-2'-fluoro
  misc_feature (4)..(12): 2'-deoxy-2'-fluoro
  misc_feature (14)..(14): 2'-deoxy-2'-fluoro
  misc_feature (16)..(17): 2'-deoxy-2'-fluoro
  misc_feature (19)..(19): 2'-deoxy-2'-fluoro
  misc_feature (20)..(20): Phosphorothioate 3'-Internucleotide Linkage
  misc_feature (21)..(21): n stands for thymidine
ucaucccuuuucauguugunn

SEQ ID NO: 1531 - RNA, 21 nt, Artificial Sequence
  Description of Artificial Sequence:  siNA antisense region
  misc_feature (1)..(2): 2'-deoxy-2'-fluoro
  misc_feature (4)..(4): 2'-deoxy-2'-fluoro
  misc_feature (10)..(14): 2'-deoxy-2'-fluoro
  misc_feature (16)..(19): 2'-deoxy-2'-fluoro
  misc_feature (20)..(20): Phosphorothioate 3'-Internucleotide Linkage
  misc_feature (21)..(21): n stands for thymidine
uugugaggaucuucaucccnn

SEQ ID NO: 1532 - RNA, 21 nt, Artificial Sequence
  Description of Artificial Sequence:  siNA antisense region
  misc_feature (3)..(8): 2'-deoxy-2'-fluoro
  misc_feature (10)..(11): 2'-deoxy-2'-fluoro
  misc_feature (14)..(19): 2'-deoxy-2'-fluoro
  misc_feature (20)..(20): Phosphorothioate 3'-Internucleotide Linkage
  misc_feature (21)..(21): n stands for thymidine
aauuucucaucgauuucccnn

SEQ ID NO: 1533 - RNA, 21 nt, Artificial Sequence
  Description of Artificial Sequence:  siNA antisense region
  misc_feature (1)..(1): 2'-deoxy-2'-fluoro
  misc_feature (4)..(9): 2'-deoxy-2'-fluoro
  misc_feature (11)..(12): 2'-deoxy-2'-fluoro
  misc_feature (15)..(19): 2'-deoxy-2'-fluoro
  misc_feature (20)..(20): Phosphorothioate 3'-Internucleotide Linkage
  misc_feature (21)..(21): n stands for thymidine
caauuucucaucgauuuccnn

SEQ ID NO: 1534 - RNA, 21 nt, Artificial Sequence
  Description of Artificial Sequence:  siNA antisense region
  misc_feature (2)..(2): 2'-deoxy-2'-fluoro
  misc_feature (6)..(6): 2'-deoxy-2'-fluoro
  misc_feature (8)..(12): 2'-deoxy-2'-fluoro
  misc_feature (16)..(16): 2'-deoxy-2'-fluoro
  misc_feature (19)..(19): 2'-deoxy-2'-fluoro
  misc_feature (20)..(20): Phosphorothioate 3'-Internucleotide Linkage
  misc_feature (21)..(21): n stands for thymidine
augagcaccucuaggcaaunn

SEQ ID NO: 1535 - RNA, 21 nt, Artificial Sequence
  Description of Artificial Sequence:  siNA sense region
  misc_feature (1)..(1): 5'-3 attached terminal deoxyabasic moeity
  misc_feature (1)..(1): 2'-deoxy
  misc_feature (2)..(2): 2'-deoxy-2'-fluoro
  misc_feature (3)..(3): 2'-deoxy
  misc_feature (4)..(4): 2'-deoxy-2'-fluoro
  misc_feature (5)..(5): 2'-deoxy
  misc_feature (6)..(7): 2'-deoxy-2'-fluoro
  misc_feature (8)..(10): 2'-deoxy
  misc_feature (11)..(13): 2'-deoxy-2'-fluoro
  misc_feature (14)..(14): 2'-deoxy
  misc_feature (15)..(15): 2'-deoxy-2'-fluoro
  misc_feature (16)..(18): 2'-deoxy
  misc_feature (19)..(19): 2'-deoxy-2'-fluoro
  misc_feature (20)..(20): n stands for thymidine
  misc_feature (21)..(21): 3'-3 attached terminal deoxyabasic moeity
auacacuggaccugugggcnn

SEQ ID NO: 1536 - RNA, 21 nt, Artificial Sequence
  Description of Artificial Sequence:  siNA sense region
  misc_feature (1)..(1): 5'-3 attached terminal deoxyabasic moeity
  misc_feature (1)..(6): 2'-deoxy
  misc_feature (7)..(9): 2'-deoxy-2'-fluoro
  misc_feature (10)..(11): 2'-deoxy
  misc_feature (12)..(12): 2'-deoxy-2'-fluoro
  misc_feature (13)..(14): 2'-deoxy
  misc_feature (15)..(17): 2'-deoxy-2'-fluoro
  misc_feature (18)..(18): 2'-deoxy
  misc_feature (19)..(19): 2'-deoxy-2'-fluoro
  misc_feature (20)..(20): n stands for thymidine
  misc_feature (21)..(21): 3'-3 attached terminal deoxyabasic moeity
aggaaaccugacaguucacnn

SEQ ID NO: 1537 - RNA, 21 nt, Artificial Sequence
  Description of Artificial Sequence:  siNA sense region
  misc_feature (1)..(1): 5'-3 attached terminal deoxyabasic moeity
  misc_feature (1)..(1): 2'-deoxy-2'-fluoro
  misc_feature (2)..(2): 2'-deoxy
  misc_feature (3)..(3): 2'-deoxy-2'-fluoro
  misc_feature (4)..(5): 2'-deoxy
  misc_feature (6)..(6): 2'-deoxy-2'-fluoro
  misc_feature (7)..(7): 2'-deoxy
  misc_feature (8)..(8): 2'-deoxy-2'-fluoro
  misc_feature (9)..(17): 2'-deoxy
  misc_feature (18)..(18): 2'-deoxy-2'-fluoro
  misc_feature (19)..(19): 2'-deoxy
  misc_feature (20)..(20): n stands for thymidine
  misc_feature (21)..(21): 3'-3 attached terminal deoxyabasic moeity
cacaacaugaaaagggaugnn

SEQ ID NO: 1538 - RNA, 21 nt, Artificial Sequence
  Description of Artificial Sequence:  siNA sense region
  misc_feature (1)..(1): 5'-3 attached terminal deoxyabasic moeity
  misc_feature (1)..(1): 2'-deoxy
  misc_feature (2)..(2): 2'-deoxy-2'-fluoro
  misc_feature (3)..(4): 2'-deoxy
  misc_feature (5)..(5): 2'-deoxy-2'-fluoro
  misc_feature (6)..(6): 2'-deoxy
  misc_feature (7)..(7): 2'-deoxy-2'-fluoro
  misc_feature (8)..(16): 2'-deoxy
  misc_feature (17)..(17): 2'-deoxy-2'-fluoro
  misc_feature (18)..(19): 2'-deoxy
  misc_feature (20)..(20): n stands for thymidine
  misc_feature (21)..(21): 3'-3 attached terminal deoxyabasic moeity
acaacaugaaaagggaugann

SEQ ID NO: 1539 - RNA, 21 nt, Artificial Sequence
  Description of Artificial Sequence:  siNA sense region
  misc_feature (1)..(1): 5'-3 attached terminal deoxyabasic moeity
  misc_feature (1)..(4): 2'-deoxy
  misc_feature (5)..(5): 2'-deoxy-2'-fluoro
  misc_feature (6)..(10): 2'-deoxy
  misc_feature (11)..(15): 2'-deoxy-2'-fluoro
  misc_feature (16)..(16): 2'-deoxy
  misc_feature (17)..(17): 2'-deoxy-2'-fluoro
  misc_feature (18)..(19): 2'-deoxy
  misc_feature (20)..(20): n stands for thymidine
  misc_feature (21)..(21): 3'-3 attached terminal deoxyabasic moeity
gggaugaagauccucacaann

SEQ ID NO: 1540 - RNA, 21 nt, Artificial Sequence
  Description of Artificial Sequence:  siNA sense region
  misc_feature (1)..(1): 5'-3 attached terminal deoxyabasic moeity
  misc_feature (1)..(6): 2'-deoxy
  misc_feature (7)..(8): 2'-deoxy-2'-fluoro
  misc_feature (9)..(10): 2'-deoxy
  misc_feature (11)..(11): 2'-deoxy-2'-fluoro
  misc_feature (12)..(17): 2'-deoxy
  misc_feature (18)..(19): 2'-deoxy-2'-fluoro
  misc_feature (20)..(20): n stands for thymidine
  misc_feature (21)..(21): 3'-3 attached terminal deoxyabasic moeity
gggaaaucgaugagaaauunn

SEQ ID NO: 1541 - RNA, 21 nt, Artificial Sequence
  Description of Artificial Sequence:  siNA sense region
  misc_feature (1)..(1): 5'-3 attached terminal deoxyabasic moeity
  misc_feature (1)..(5): 2'-deoxy
  misc_feature (6)..(7): 2'-deoxy-2'-fluoro
  misc_feature (8)..(9): 2'-deoxy
  misc_feature (10)..(10): 2'-deoxy-2'-fluoro
  misc_feature (11)..(16): 2'-deoxy
  misc_feature (17)..(18): 2'-deoxy-2'-fluoro
  misc_feature (19)..(19): 2'-deoxy
  misc_feature (20)..(20): n stands for thymidine
  misc_feature (21)..(21): 3'-3 attached terminal deoxyabasic moeity
ggaaaucgaugagaaauugnn

SEQ ID NO: 1542 - RNA, 21 nt, Artificial Sequence
  Description of Artificial Sequence:  siNA sense region
  misc_feature (1)..(1): 5'-3 attached terminal deoxyabasic moeity
  misc_feature (1)..(1): 2'-deoxy
  misc_feature (2)..(3): 2'-deoxy-2'-fluoro
  misc_feature (4)..(4): 2'-deoxy
  misc_feature (5)..(7): 2'-deoxy-2'-fluoro
  misc_feature (8)..(12): 2'-deoxy
  misc_feature (13)..(13): 2'-deoxy-2'-fluoro
  misc_feature (14)..(14): 2'-deoxy
  misc_feature (15)..(17): 2'-deoxy-2'-fluoro
  misc_feature (18)..(18): 2'-deoxy
  misc_feature (19)..(19): 2'-deoxy-2'-fluoro
  misc_feature (20)..(20): n stands for thymidine
  misc_feature (21)..(21): 3'-3 attached terminal deoxyabasic moeity
auugccuagaggugcucaunn

SEQ ID NO: 1543 - RNA, 21 nt, Artificial Sequence
  Description of Artificial Sequence:  siNA antisense region
  misc_feature (1)..(1): 2'-deoxy
  misc_feature (2)..(4): 2'-deoxy-2'-fluoro
  misc_feature (5)..(5): 2'-deoxy
  misc_feature (6)..(6): 2'-deoxy-2'-fluoro
  misc_feature (7)..(9): 2'-deoxy
  misc_feature (10)..(12): 2'-deoxy-2'-fluoro
  misc_feature (13)..(14): 2'-deoxy
  misc_feature (15)..(15): 2'-deoxy-2'-fluoro
  misc_feature (16)..(16): 2'-deoxy
  misc_feature (17)..(17): 2'-deoxy-2'-fluoro
  misc_feature (18)..(18): 2'-deoxy
  misc_feature (19)..(19): 2'-deoxy-2'-fluoro
  misc_feature (20)..(20): Phosphorothioate 3'-Internucleotide Linkage
  misc_feature (21)..(21): n stands for thymidine
gcccacagguccaguguaunn

SEQ ID NO: 1544 - RNA, 21 nt, Artificial Sequence
  Description of Artificial Sequence:  siNA antisense region
  misc_feature (1)..(1): 2'-deoxy
  misc_feature (2)..(2): 2'-deoxy-2'-fluoro
  misc_feature (3)..(5): 2'-deoxy
  misc_feature (6)..(7): 2'-deoxy-2'-fluoro
  misc_feature (8)..(8): 2'-deoxy
  misc_feature (9)..(10): 2'-deoxy-2'-fluoro
  misc_feature (11)..(13): 2'-deoxy
  misc_feature (14)..(19): 2'-deoxy-2'-fluoro
  misc_feature (20)..(20): Phosphorothioate 3'-Internucleotide Linkage
  misc_feature (21)..(21): n stands for thymidine
gugaacugucagguuuccunn

SEQ ID NO: 1545 - RNA, 21 nt, Artificial Sequence
  Description of Artificial Sequence:  siNA antisense region
  misc_feature (1)..(1): 2'-deoxy-2'-fluoro
  misc_feature (2)..(2): 2'-deoxy
  misc_feature (3)..(11): 2'-deoxy-2'-fluoro
  misc_feature (12)..(12): 2'-deoxy
  misc_feature (13)..(13): 2'-deoxy-2'-fluoro
  misc_feature (14)..(14): 2'-deoxy
  misc_feature (15)..(16): 2'-deoxy-2'-fluoro
  misc_feature (17)..(17): 2'-deoxy
  misc_feature (18)..(18): 2'-deoxy-2'-fluoro
  misc_feature (19)..(19): 2'-deoxy
  misc_feature (20)..(20): Phosphorothioate 3'-Internucleotide Linkage
  misc_feature (21)..(21): n stands for thymidine
caucccuuuucauguugugnn

SEQ ID NO: 1546 - RNA, 21 nt, Artificial Sequence
  Description of Artificial Sequence:  siNA antisense region
  misc_feature (1)..(2): 2'-deoxy-2'-fluoro
  misc_feature (3)..(3): 2'-deoxy
  misc_feature (4)..(12): 2'-deoxy-2'-fluoro
  misc_feature (13)..(13): 2'-deoxy
  misc_feature (14)..(14): 2'-deoxy-2'-fluoro
  misc_feature (15)..(15): 2'-deoxy
  misc_feature (16)..(17): 2'-deoxy-2'-fluoro
  misc_feature (18)..(18): 2'-deoxy
  misc_feature (19)..(19): 2'-deoxy-2'-fluoro
  misc_feature (20)..(20): Phosphorothioate 3'-Internucleotide Linkage
  misc_feature (21)..(21): n stands for thymidine
ucaucccuuuucauguugunn

SEQ ID NO: 1547 - RNA, 21 nt, Artificial Sequence
  Description of Artificial Sequence:  siNA antisense region
  misc_feature (1)..(2): 2'-deoxy-2'-fluoro
  misc_feature (3)..(3): 2'-deoxy
  misc_feature (4)..(4): 2'-deoxy-2'-fluoro
  misc_feature (5)..(9): 2'-deoxy
  misc_feature (10)..(14): 2'-deoxy-2'-fluoro
  misc_feature (15)..(15): 2'-deoxy
  misc_feature (16)..(19): 2'-deoxy-2'-fluoro
  misc_feature (20)..(20): Phosphorothioate 3'-Internucleotide Linkage
  misc_feature (21)..(21): n stands for thymidine
uugugaggaucuucaucccnn

SEQ ID NO: 1548 - RNA, 21 nt, Artificial Sequence
  Description of Artificial Sequence:  siNA antisense region
  misc_feature (1)..(2): 2'-deoxy
  misc_feature (3)..(8): 2'-deoxy-2'-fluoro
  misc_feature (9)..(9): 2'-deoxy
  misc_feature (10)..(11): 2'-deoxy-2'-fluoro
  misc_feature (12)..(13): 2'-deoxy
  misc_feature (14)..(19): 2'-deoxy-2'-fluoro
  misc_feature (20)..(20): Phosphorothioate 3'-Internucleotide Linkage
  misc_feature (21)..(21): n stands for thymidine
aauuucucaucgauuucccnn

SEQ ID NO: 1549 - RNA, 21 nt, Artificial Sequence
  Description of Artificial Sequence:  siNA antisense region
  misc_feature (1)..(1): 2'-deoxy-2'-fluoro
  misc_feature (2)..(3): 2'-deoxy
  misc_feature (4)..(9): 2'-deoxy-2'-fluoro
  misc_feature (10)..(10): 2'-deoxy
  misc_feature (11)..(12): 2'-deoxy-2'-fluoro
  misc_feature (13)..(14): 2'-deoxy
  misc_feature (15)..(19): 2'-deoxy-2'-fluoro
  misc_feature (20)..(20): Phosphorothioate 3'-Internucleotide Linkage
  misc_feature (21)..(21): n stands for thymidine
caauuucucaucgauuuccnn

SEQ ID NO: 1550 - RNA, 21 nt, Artificial Sequence
  Description of Artificial Sequence:  siNA antisense region
  misc_feature (1)..(1): 2'-deoxy
  misc_feature (2)..(2): 2'-deoxy-2'-fluoro
  misc_feature (3)..(5): 2'-deoxy
  misc_feature (6)..(6): 2'-deoxy-2'-fluoro
  misc_feature (7)..(7): 2'-deoxy
  misc_feature (8)..(12): 2'-deoxy-2'-fluoro
  misc_feature (13)..(15): 2'-deoxy
  misc_feature (16)..(16): 2'-deoxy-2'-fluoro
  misc_feature (17)..(18): 2'-deoxy
  misc_feature (19)..(19): 2'-deoxy-2'-fluoro
  misc_feature (20)..(20): Phosphorothioate 3'-Internucleotide Linkage
  misc_feature (21)..(21): n stands for thymidine
augagcaccucuaggcaaunn

SEQ ID NO: 1551 - RNA, 21 nt, Artificial Sequence
  Description of Artificial Sequence:  siNA sense region
  misc_feature (1)..(1): 5'-3 attached terminal deoxyabasic moeity
  misc_feature (1)..(1): 2'-O-methyl
  misc_feature (2)..(2): 2'-deoxy-2'-fluoro
  misc_feature (3)..(3): 2'-O-methyl
  misc_feature (4)..(4): 2'-deoxy-2'-fluoro
  misc_feature (5)..(5): 2'-O-methyl
  misc_feature (6)..(7): 2'-deoxy-2'-fluoro
  misc_feature (8)..(10): 2'-O-methyl
  misc_feature (11)..(13): 2'-deoxy-2'-fluoro
  misc_feature (14)..(14): 2'-O-methyl
  misc_feature (15)..(15): 2'-deoxy-2'-fluoro
  misc_feature (16)..(18): 2'-O-methyl
  misc_feature (19)..(19): 2'-deoxy-2'-fluoro
  misc_feature (20)..(20): n stands for thymidine
  misc_feature (21)..(21): 3'-3 attached terminal deoxyabasic moeity
auacacuggaccugugggcnn

SEQ ID NO: 1552 - RNA, 21 nt, Artificial Sequence
  Description of Artificial Sequence:  siNA sense region
  misc_feature (1)..(1): 5'-3 attached terminal deoxyabasic moeity
  misc_feature (2)..(6): 2'-O-methyl
  misc_feature (7)..(9): 2'-deoxy-2'-fluoro
  misc_feature (10)..(11): 2'-O-methyl
  misc_feature (12)..(12): 2'-deoxy-2'-fluoro
  misc_feature (13)..(14): 2'-O-methyl
  misc_feature (15)..(17): 2'-deoxy-2'-fluoro
  misc_feature (16)..(18): 2'-O-methyl
  misc_feature (19)..(19): 2'-deoxy-2'-fluoro
  misc_feature (20)..(20): n stands for thymidine
  misc_feature (21)..(21): 3'-3 attached terminal deoxyabasic moeity
aggaaaccugacaguucacnn

SEQ ID NO: 1553 - RNA, 21 nt, Artificial Sequence
  Description of Artificial Sequence:  siNA sense region
  misc_feature (1)..(1): 5'-3 attached terminal deoxyabasic moeity
  misc_feature (1)..(1): 2'-deoxy-2'-fluoro
  misc_feature (2)..(2): 2'-O-methyl
  misc_feature (3)..(3): 2'-deoxy-2'-fluoro
  misc_feature (4)..(5): 2'-O-methyl
  misc_feature (6)..(6): 2'-deoxy-2'-fluoro
  misc_feature (7)..(7): 2'-O-methyl
  misc_feature (8)..(8): 2'-deoxy-2'-fluoro
  misc_feature (9)..(17): 2'-O-methyl
  misc_feature (18)..(18): 2'-deoxy-2'-fluoro
  misc_feature (20)..(20): n stands for thymidine
  misc_feature (21)..(21): 3'-3 attached terminal deoxyabasic moeity
cacaacaugaaaagggaugnn

SEQ ID NO: 1554 - RNA, 21 nt, Artificial Sequence
  Description of Artificial Sequence:  siNA sense region
  misc_feature (1)..(1): 5'-3 attached terminal deoxyabasic moeity
  misc_feature (1)..(1): 2'-O-methyl
  misc_feature (2)..(2): 2'-deoxy-2'-fluoro
  misc_feature (3)..(4): 2'-O-methyl
  misc_feature (5)..(5): 2'-deoxy-2'-fluoro
  misc_feature (6)..(6): 2'-O-methyl
  misc_feature (7)..(7): 2'-deoxy-2'-fluoro
  misc_feature (8)..(16): 2'-O-methyl
  misc_feature (17)..(17): 2'-deoxy-2'-fluoro
  misc_feature (18)..(19): 2'-O-methyl
  misc_feature (20)..(20): n stands for thymidine
  misc_feature (21)..(21): 3'-3 attached terminal deoxyabasic moeity
acaacaugaaaagggaugann

SEQ ID NO: 1555 - RNA, 21 nt, Artificial Sequence
  Description of Artificial Sequence:  siNA sense region
  misc_feature (1)..(1): 5'-3 attached terminal deoxyabasic moeity
  misc_feature (1)..(4): 2'-O-methyl
  misc_feature (5)..(5): 2'-deoxy-2'-fluoro
  misc_feature (6)..(10): 2'-O-methyl
  misc_feature (11)..(15): 2'-deoxy-2'-fluoro
  misc_feature (16)..(16): 2'-O-methyl
  misc_feature (17)..(17): 2'-deoxy-2'-fluoro
  misc_feature (18)..(19): 2'-O-methyl
  misc_feature (20)..(20): n stands for thymidine
  misc_feature (21)..(21): 3'-3 attached terminal deoxyabasic moeity
gggaugaagauccucacaann

SEQ ID NO: 1556 - RNA, 21 nt, Artificial Sequence
  Description of Artificial Sequence:  siNA sense region
  misc_feature (1)..(1): 5'-3 attached terminal deoxyabasic moeity
  misc_feature (1)..(6): 2'-O-methyl
  misc_feature (7)..(8): 2'-deoxy-2'-fluoro
  misc_feature (9)..(10): 2'-O-methyl
  misc_feature (11)..(11): 2'-deoxy-2'-fluoro
  misc_feature (12)..(17): 2'-O-methyl
  misc_feature (18)..(19): 2'-deoxy-2'-fluoro
  misc_feature (20)..(20): n stands for thymidine
  misc_feature (21)..(21): 3'-3 attached terminal deoxyabasic moeity
gggaaaucgaugagaaauunn

SEQ ID NO: 1557 - RNA, 21 nt, Artificial Sequence
  Description of Artificial Sequence:  siNA sense region
  misc_feature (1)..(1): 5'-3 attached terminal deoxyabasic moeity
  misc_feature (1)..(5): 2'-O-methyl
  misc_feature (6)..(7): 2'-deoxy-2'-fluoro
  misc_feature (8)..(9): 2'-O-methyl
  misc_feature (10)..(10): 2'-deoxy-2'-fluoro
  misc_feature (11)..(16): 2'-O-methyl
  misc_feature (17)..(18): 2'-deoxy-2'-fluoro
  misc_feature (19)..(19): 2'-O-methyl
  misc_feature (20)..(20): n stands for thymidine
  misc_feature (21)..(21): 3'-3 attached terminal deoxyabasic moeity
ggaaaucgaugagaaauugnn

SEQ ID NO: 1558 - RNA, 21 nt, Artificial Sequence
  Description of Artificial Sequence:  siNA sense region
  misc_feature (1)..(1): 5'-3 attached terminal deoxyabasic moeity
  misc_feature (1)..(1): 2'-O-methyl
  misc_feature (2)..(3): 2'-deoxy-2'-fluoro
  misc_feature (4)..(4): 2'-O-methyl
  misc_feature (5)..(7): 2'-deoxy-2'-fluoro
  misc_feature (8)..(12): 2'-O-methyl
  misc_feature (13)..(13): 2'-deoxy-2'-fluoro
  misc_feature (14)..(14): 2'-O-methyl
  misc_feature (15)..(17): 2'-deoxy-2'-fluoro
  misc_feature (16)..(18): 2'-O-methyl
  misc_feature (19)..(19): 2'-deoxy-2'-fluoro
  misc_feature (20)..(20): n stands for thymidine
  misc_feature (21)..(21): 3'-3 attached terminal deoxyabasic moeity
auugccuagaggugcucaunn

SEQ ID NO: 1559 - RNA, 21 nt, Artificial Sequence
  Description of Artificial Sequence:  siNA antisense region
  misc_feature (1)..(1): 2'-O-methyl
  misc_feature (2)..(4): 2'-deoxy-2'-fluoro
  misc_feature (5)..(5): 2'-O-methyl
  misc_feature (6)..(6): 2'-deoxy-2'-fluoro
  misc_feature (7)..(9): 2'-O-methyl
  misc_feature (10)..(12): 2'-deoxy-2'-fluoro
  misc_feature (13)..(14): 2'-O-methyl
  misc_feature (15)..(15): 2'-deoxy-2'-fluoro
  misc_feature (16)..(16): 2'-O-methyl
  misc_feature (17)..(17): 2'-deoxy-2'-fluoro
  misc_feature (18)..(18): 2'-O-methyl
  misc_feature (19)..(19): 2'-deoxy-2'-fluoro
  misc_feature (20)..(20): Phosphorothioate 3'-Internucleotide Linkage
  misc_feature (21)..(21): n stands for thymidine
gcccacagguccaguguaunn

SEQ ID NO: 1560 - RNA, 21 nt, Artificial Sequence
  Description of Artificial Sequence:  siNA antisense region
  misc_feature (1)..(1): 2'-O-methyl
  misc_feature (2)..(2): 2'-deoxy-2'-fluoro
  misc_feature (3)..(5): 2'-O-methyl
  misc_feature (6)..(7): 2'-deoxy-2'-fluoro
  misc_feature (8)..(8): 2'-O-methyl
  misc_feature (9)..(10): 2'-deoxy-2'-fluoro
  misc_feature (11)..(13): 2'-O-methyl
  misc_feature (14)..(19): 2'-deoxy-2'-fluoro
  misc_feature (20)..(20): Phosphorothioate 3'-Internucleotide Linkage
  misc_feature (21)..(21): n stands for thymidine
gugaacugucagguuuccunn

SEQ ID NO: 1561 - RNA, 21 nt, Artificial Sequence
  Description of Artificial Sequence:  siNA antisense region
  misc_feature (1)..(1): 2'-deoxy-2'-fluoro
  misc_feature (2)..(2): 2'-O-methyl
  misc_feature (3)..(11): 2'-deoxy-2'-fluoro
  misc_feature (12)..(12): 2'-O-methyl
  misc_feature (13)..(13): 2'-deoxy-2'-fluoro
  misc_feature (14)..(14): 2'-O-methyl
  misc_feature (15)..(16): 2'-deoxy-2'-fluoro
  misc_feature (17)..(17): 2'-O-methyl
  misc_feature (18)..(18): 2'-deoxy-2'-fluoro
  misc_feature (19)..(19): 2'-O-methyl
  misc_feature (20)..(20): Phosphorothioate 3'-Internucleotide Linkage
  misc_feature (21)..(21): n stands for thymidine
caucccuuuucauguugugnn

SEQ ID NO: 1562 - RNA, 21 nt, Artificial Sequence
  Description of Artificial Sequence:  siNA antisense region
  misc_feature (1)..(2): 2'-deoxy-2'-fluoro
  misc_feature (3)..(3): 2'-O-methyl
  misc_feature (4)..(12): 2'-deoxy-2'-fluoro
  misc_feature (13)..(13): 2'-O-methyl
  misc_feature (14)..(14): 2'-deoxy-2'-fluoro
  misc_feature (15)..(15): 2'-O-methyl
  misc_feature (16)..(17): 2'-deoxy-2'-fluoro
  misc_feature (18)..(18): 2'-O-methyl
  misc_feature (19)..(19): 2'-deoxy-2'-fluoro
  misc_feature (20)..(20): Phosphorothioate 3'-Internucleotide Linkage
  misc_feature (21)..(21): n stands for thymidine
ucaucccuuuucauguugunn

SEQ ID NO: 1563 - RNA, 21 nt, Artificial Sequence
  Description of Artificial Sequence:  siNA antisense region
  misc_feature (1)..(2): 2'-deoxy-2'-fluoro
  misc_feature (3)..(3): 2'-O-methyl
  misc_feature (4)..(4): 2'-deoxy-2'-fluoro
  misc_feature (5)..(9): 2'-O-methyl
  misc_feature (10)..(14): 2'-deoxy-2'-fluoro
  misc_feature (15)..(15): 2'-O-methyl
  misc_feature (16)..(19): 2'-deoxy-2'-fluoro
  misc_feature (20)..(20): Phosphorothioate 3'-Internucleotide Linkage
  misc_feature (21)..(21): n stands for thymidine
uugugaggaucuucaucccnn

SEQ ID NO: 1564 - RNA, 21 nt, Artificial Sequence
  Description of Artificial Sequence:  siNA antisense region
  misc_feature (1)..(2): 2'-O-methyl
  misc_feature (3)..(8): 2'-deoxy-2'-fluoro
  misc_feature (9)..(9): 2'-O-methyl
  misc_feature (10)..(11): 2'-deoxy-2'-fluoro
  misc_feature (12)..(13): 2'-O-methyl
  misc_feature (14)..(19): 2'-deoxy-2'-fluoro
  misc_feature (20)..(20): Phosphorothioate 3'-Internucleotide Linkage
  misc_feature (21)..(21): n stands for thymidine
aauuucucaucgauuucccnn

SEQ ID NO: 1565 - RNA, 21 nt, Artificial Sequence
  Description of Artificial Sequence:  siNA antisense region
  misc_feature (1)..(1): 2'-deoxy-2'-fluoro
  misc_feature (2)..(3): 2'-O-methyl
  misc_feature (4)..(9): 2'-deoxy-2'-fluoro
  misc_feature (10)..(10): 2'-O-methyl
  misc_feature (11)..(12): 2'-deoxy-2'-fluoro
  misc_feature (13)..(14): 2'-O-methyl
  misc_feature (15)..(19): 2'-deoxy-2'-fluoro
  misc_feature (20)..(20): Phosphorothioate 3'-Internucleotide Linkage
  misc_feature (21)..(21): n stands for thymidine
caauuucucaucgauuuccnn

SEQ ID NO: 1566 - RNA, 21 nt, Artificial Sequence
  Description of Artificial Sequence:  siNA antisense region
  misc_feature (1)..(1): 2'-O-methyl
  misc_feature (2)..(2): 2'-deoxy-2'-fluoro
  misc_feature (3)..(5): 2'-O-methyl
  misc_feature (6)..(6): 2'-deoxy-2'-fluoro
  misc_feature (7)..(7): 2'-O-methyl
  misc_feature (8)..(12): 2'-deoxy-2'-fluoro
  misc_feature (13)..(15): 2'-O-methyl
  misc_feature (16)..(16): 2'-deoxy-2'-fluoro
  misc_feature (17)..(18): 2'-O-methyl
  misc_feature (19)..(19): 2'-deoxy-2'-fluoro
  misc_feature (20)..(20): Phosphorothioate 3'-Internucleotide Linkage
  misc_feature (21)..(21): n stands for thymidine
augagcaccucuaggcaaunn

SEQ ID NO: 1567 - RNA, 21 nt, Artificial Sequence
  Description of Artificial Sequence:  siNA sense region
  misc_feature (1)..(1): 5'-3 attached terminal deoxyabasic moeity
  misc_feature (20)..(21): n stands for thymidine
  misc_feature (21)..(21): 3'-3 attached terminal deoxyabasic moeity
auacacuggaccugugggcnn

SEQ ID NO: 1568 - RNA, 21 nt, Artificial Sequence
  Description of Artificial Sequence:  siNA sense region
  misc_feature (1)..(1): 5'-3 attached terminal deoxyabasic moeity
  misc_feature (20)..(21): n stands for thymidine
  misc_feature (21)..(21): 3'-3 attached terminal deoxyabasic moeity
aggaaaccugacaguucacnn

SEQ ID NO: 1569 - RNA, 21 nt, Artificial Sequence
  Description of Artificial Sequence:  siNA sense region
  misc_feature (1)..(1): 5'-3 attached terminal deoxyabasic moeity
  misc_feature (20)..(21): n stands for thymidine
  misc_feature (21)..(21): 3'-3 attached terminal deoxyabasic moeity
cacaacaugaaaagggaugnn

SEQ ID NO: 1570 - RNA, 21 nt, Artificial Sequence
  Description of Artificial Sequence:  siNA sense region
  misc_feature (1)..(1): 5'-3 attached terminal deoxyabasic moeity
  misc_feature (20)..(21): n stands for thymidine
  misc_feature (21)..(21): 3'-3 attached terminal deoxyabasic moeity
acaacaugaaaagggaugann

SEQ ID NO: 1571 - RNA, 21 nt, Artificial Sequence
  Description of Artificial Sequence:  siNA sense region
  misc_feature (1)..(1): 5'-3 attached terminal deoxyabasic moeity
  misc_feature (20)..(21): n stands for thymidine
  misc_feature (21)..(21): 3'-3 attached terminal deoxyabasic moeity
gggaugaagauccucacaann

SEQ ID NO: 1572 - RNA, 21 nt, Artificial Sequence
  Description of Artificial Sequence:  siNA sense region
  misc_feature (1)..(1): 5'-3 attached terminal deoxyabasic moeity
  misc_feature (20)..(21): n stands for thymidine
  misc_feature (21)..(21): 3'-3 attached terminal deoxyabasic moeity
gggaaaucgaugagaaauunn

SEQ ID NO: 1573 - RNA, 21 nt, Artificial Sequence
  Description of Artificial Sequence:  siNA sense region
  misc_feature (1)..(1): 5'-3 attached terminal deoxyabasic moeity
  misc_feature (20)..(21): n stands for thymidine
  misc_feature (21)..(21): 3'-3 attached terminal deoxyabasic moeity
ggaaaucgaugagaaauugnn

SEQ ID NO: 1574 - RNA, 21 nt, Artificial Sequence
  Description of Artificial Sequence:  siNA sense region
  misc_feature (1)..(1): 5'-3 attached terminal deoxyabasic moeity
  misc_feature (20)..(21): n stands for thymidine
  misc_feature (21)..(21): 3'-3 attached terminal deoxyabasic moeity
auugccuagaggugcucaunn

SEQ ID NO: 1575 - RNA, 21 nt, Artificial Sequence
  Description of Artificial Sequence:  siNA antisense region
  misc_feature (20)..(20): Phosphorothioate 3'-Internucleotide Linkage
  misc_feature (21)..(21): n stands for thymidine
gcccacagguccaguguaunn

SEQ ID NO: 1576 - RNA, 21 nt, Artificial Sequence
  Description of Artificial Sequence:  siNA antisense region
  misc_feature (20)..(20): Phosphorothioate 3'-Internucleotide Linkage
  misc_feature (21)..(21): n stands for thymidine
gugaacugucagguuuccunn

SEQ ID NO: 1577 - RNA, 21 nt, Artificial Sequence
  Description of Artificial Sequence:  siNA antisense region
  misc_feature (20)..(20): Phosphorothioate 3'-Internucleotide Linkage
  misc_feature (21)..(21): n stands for thymidine
caucccuuuucauguugugnn

SEQ ID NO: 1578 - RNA, 21 nt, Artificial Sequence
  Description of Artificial Sequence:  siNA antisense region
  misc_feature (20)..(20): Phosphorothioate 3'-Internucleotide Linkage
  misc_feature (21)..(21): n stands for thymidine
ucaucccuuuucauguugunn

SEQ ID NO: 1579 - RNA, 21 nt, Artificial Sequence
  Description of Artificial Sequence:  siNA antisense region
  misc_feature (20)..(20): Phosphorothioate 3'-Internucleotide Linkage
  misc_feature (21)..(21): n stands for thymidine
uugugaggaucuucaucccnn

SEQ ID NO: 1580 - RNA, 21 nt, Artificial Sequence
  Description of Artificial Sequence:  siNA antisense region
  misc_feature (20)..(20): Phosphorothioate 3'-Internucleotide Linkage
  misc_feature (21)..(21): n stands for thymidine
aauuucucaucgauuucccnn

SEQ ID NO: 1581 - RNA, 21 nt, Artificial Sequence
  Description of Artificial Sequence:  siNA antisense region
  misc_feature (20)..(20): Phosphorothioate 3'-Internucleotide Linkage
  misc_feature (21)..(21): n stands for thymidine
caauuucucaucgauuuccnn

SEQ ID NO: 1582 - RNA, 21 nt, Artificial Sequence
  Description of Artificial Sequence:  siNA antisense region
  misc_feature (20)..(20): Phosphorothioate 3'-Internucleotide Linkage
  misc_feature (21)..(21): n stands for thymidine
augagcaccucuaggcaaunn

SEQ ID NO: 1583 - RNA, 21 nt, Artificial Sequence
  Description of Artificial Sequence:  siNA antisense region
  misc_feature (20)..(21): n stands for thymidine
  misc_feature (21)..(21): 3'-3 attached terminal deoxyabasic moeity
gcccacagguccaguguaunn

SEQ ID NO: 1584 - RNA, 21 nt, Artificial Sequence
  Description of Artificial Sequence:  siNA antisense region
  misc_feature (20)..(21): n stands for thymidine
  misc_feature (21)..(21): 3'-3 attached terminal deoxyabasic moeity
gugaacugucagguuuccunn

SEQ ID NO: 1585 - RNA, 21 nt, Artificial Sequence
  Description of Artificial Sequence:  siNA antisense region
  misc_feature (20)..(21): n stands for thymidine
  misc_feature (21)..(21): 3'-3 attached terminal deoxyabasic moeity
caucccuuuucauguugugnn

SEQ ID NO: 1586 - RNA, 21 nt, Artificial Sequence
  Description of Artificial Sequence:  siNA antisense region
  misc_feature (20)..(21): n stands for thymidine
  misc_feature (21)..(21): 3'-3 attached terminal deoxyabasic moeity
ucaucccuuuucauguugunn

SEQ ID NO: 1587 - RNA, 21 nt, Artificial Sequence
  Description of Artificial Sequence:  siNA antisense region
  misc_feature (20)..(21): n stands for thymidine
  misc_feature (21)..(21): 3'-3 attached terminal deoxyabasic moeity
uugugaggaucuucaucccnn

SEQ ID NO: 1588 - RNA, 21 nt, Artificial Sequence
  Description of Artificial Sequence:  siNA antisense region
  misc_feature (20)..(21): n stands for thymidine
  misc_feature (21)..(21): 3'-3 attached terminal deoxyabasic moeity
aauuucucaucgauuucccnn

SEQ ID NO: 1589 - RNA, 21 nt, Artificial Sequence
  Description of Artificial Sequence:  siNA antisense region
  misc_feature (20)..(21): n stands for thymidine
  misc_feature (21)..(21): 3'-3 attached terminal deoxyabasic moeity
caauuucucaucgauuuccnn

SEQ ID NO: 1590 - RNA, 21 nt, Artificial Sequence
  Description of Artificial Sequence:  siNA antisense region
  misc_feature (20)..(21): n stands for thymidine
  misc_feature (21)..(21): 3'-3 attached terminal deoxyabasic moeity
augagcaccucuaggcaaunn

SEQ ID NO: 1591 - RNA, 21 nt, Artificial Sequence
  Description of Artificial Sequence:  siNA antisense region
  misc_feature (20)..(21): n stands for thymidine
  misc_feature (21)..(21): 3'-3 attached terminal deoxyabasic moeity
gcccacagguccaguguaunn

SEQ ID NO: 1592 - RNA, 21 nt, Artificial Sequence
  Description of Artificial Sequence:  siNA antisense region
  misc_feature (20)..(21): n stands for thymidine
  misc_feature (21)..(21): 3'-3 attached terminal deoxyabasic moeity
gugaacugucagguuuccunn

SEQ ID NO: 1593 - RNA, 21 nt, Artificial Sequence
  Description of Artificial Sequence:  siNA antisense region
  misc_feature (20)..(21): n stands for thymidine
  misc_feature (21)..(21): 3'-3 attached terminal deoxyabasic moeity
caucccuuuucauguugugnn

SEQ ID NO: 1594 - RNA, 21 nt, Artificial Sequence
  Description of Artificial Sequence:  siNA antisense region
  misc_feature (20)..(21): n stands for thymidine
  misc_feature (21)..(21): 3'-3 attached terminal deoxyabasic moeity
ucaucccuuuucauguugunn

SEQ ID NO: 1595 - RNA, 21 nt, Artificial Sequence
  Description of Artificial Sequence:  siNA antisense region
  misc_feature (20)..(21): n stands for thymidine
  misc_feature (21)..(21): 3'-3 attached terminal deoxyabasic moeity
uugugaggaucuucaucccnn

SEQ ID NO: 1596 - RNA, 21 nt, Artificial Sequence
  Description of Artificial Sequence:  siNA antisense region
  misc_feature (20)..(21): n stands for thymidine
  misc_feature (21)..(21): 3'-3 attached terminal deoxyabasic moeity
aauuucucaucgauuucccnn

SEQ ID NO: 1597 - RNA, 21 nt, Artificial Sequence
  Description of Artificial Sequence:  siNA antisense region
  misc_feature (20)..(21): n stands for thymidine
  misc_feature (21)..(21): 3'-3 attached terminal deoxyabasic moeity
caauuucucaucgauuuccnn

SEQ ID NO: 1598 - RNA, 21 nt, Artificial Sequence
  Description of Artificial Sequence:  siNA antisense region
  misc_feature (20)..(21): n stands for thymidine
  misc_feature (21)..(21): 3'-3 attached terminal deoxyabasic moeity
augagcaccucuaggcaaunn

SEQ ID NO: 1599 - RNA, 21 nt, Artificial Sequence
  Description of Artificial Sequence:  siNA sense region
  misc_feature (20)..(21): n stands for thymidine
caguuuguaaaggaccugcnn

SEQ ID NO: 1600 - RNA, 21 nt, Artificial Sequence
  Description of Artificial Sequence:  siNA sense region
  misc_feature (20)..(21): n stands for thymidine
cuucacacacaggcaacugnn

SEQ ID NO: 1601 - RNA, 21 nt, Artificial Sequence
  Description of Artificial Sequence:  siNA sense region
  misc_feature (20)..(21): n stands for thymidine
aggcacacuucuucuuggunn

SEQ ID NO: 1602 - RNA, 21 nt, Artificial Sequence
  Description of Artificial Sequence:  siNA sense region
  misc_feature (20)..(21): n stands for thymidine
gacuguggcugcuagcacunn

SEQ ID NO: 1603 - RNA, 21 nt, Artificial Sequence
  Description of Artificial Sequence:  siNA sense region
  misc_feature (20)..(21): n stands for thymidine
cacuaaagcaguggacaccnn

SEQ ID NO: 1604 - RNA, 21 nt, Artificial Sequence
  Description of Artificial Sequence:  siNA sense region
  misc_feature (20)..(21): n stands for thymidine
cuaaagcaguggacaccagnn

SEQ ID NO: 1605 - RNA, 21 nt, Artificial Sequence
  Description of Artificial Sequence:  siNA sense region
  misc_feature (20)..(21): n stands for thymidine
aagcaguggacaccaggagnn

SEQ ID NO: 1606 - RNA, 21 nt, Artificial Sequence
  Description of Artificial Sequence:  siNA sense region
  misc_feature (20)..(21): n stands for thymidine
aaggguaccuugaacacugnn

SEQ ID NO: 1607 - RNA, 21 nt, Artificial Sequence
  Description of Artificial Sequence:  siNA antisense region
  misc_feature (20)..(21): n stands for thymidine
gcagguccuuuacaaacugnn

SEQ ID NO: 1608 - RNA, 21 nt, Artificial Sequence
  Description of Artificial Sequence:  siNA antisense region
  misc_feature (20)..(21): n stands for thymidine
caguugccugugugugaagnn

SEQ ID NO: 1609 - RNA, 21 nt, Artificial Sequence
  Description of Artificial Sequence:  siNA antisense region
  misc_feature (20)..(21): n stands for thymidine
accaagaagaagugugccunn

SEQ ID NO: 1610 - RNA, 21 nt, Artificial Sequence
  Description of Artificial Sequence:  siNA antisense region
  misc_feature (20)..(21): n stands for thymidine
agugcuagcagccacagucnn

SEQ ID NO: 1611 - RNA, 21 nt, Artificial Sequence
  Description of Artificial Sequence:  siNA antisense region
  misc_feature (20)..(21): n stands for thymidine
gguguccacugcuuuagugnn

SEQ ID NO: 1612 - RNA, 21 nt, Artificial Sequence
  Description of Artificial Sequence:  siNA antisense region
  misc_feature (20)..(21): n stands for thymidine
cugguguccacugcuuuagnn

SEQ ID NO: 1613 - RNA, 21 nt, Artificial Sequence
  Description of Artificial Sequence:  siNA antisense region
  misc_feature (20)..(21): n stands for thymidine
cuccugguguccacugcuunn

SEQ ID NO: 1614 - RNA, 21 nt, Artificial Sequence
  Description of Artificial Sequence:  siNA antisense region
  misc_feature (20)..(21): n stands for thymidine
caguguucaagguacccuunn

SEQ ID NO: 1615 - RNA, 21 nt, Artificial Sequence
  Description of Artificial Sequence:  siNA sense region
  misc_feature (1)..(1): 5'-3 attached terminal deoxyabasic moeity
  misc_feature (20)..(21): n stands for thymidine
  misc_feature (21)..(21): 3'-3 attached terminal deoxyabasic moeity
caguuuguaaaggaccugcnn

SEQ ID NO: 1616 - RNA, 21 nt, Artificial Sequence
  Description of Artificial Sequence:  siNA sense region
  misc_feature (1)..(1): 5'-3 attached terminal deoxyabasic moeity
  misc_feature (20)..(21): n stands for thymidine
  misc_feature (21)..(21): 3'-3 attached terminal deoxyabasic moeity
cuucacacacaggcaacugnn

SEQ ID NO: 1617 - RNA, 21 nt, Artificial Sequence
  Description of Artificial Sequence:  siNA sense region
  misc_feature (1)..(1): 5'-3 attached terminal deoxyabasic moeity
  misc_feature (20)..(21): n stands for thymidine
  misc_feature (21)..(21): 3'-3 attached terminal deoxyabasic moeity
aggcacacuucuucuuggunn

SEQ ID NO: 1618 - RNA, 21 nt, Artificial Sequence
  Description of Artificial Sequence:  siNA sense region
  misc_feature (1)..(1): 5'-3 attached terminal deoxyabasic moeity
  misc_feature (20)..(21): n stands for thymidine
  misc_feature (21)..(21): 3'-3 attached terminal deoxyabasic moeity
gacuguggcugcuagcacunn

SEQ ID NO: 1619 - RNA, 21 nt, Artificial Sequence
  Description of Artificial Sequence:  siNA sense region
  misc_feature (1)..(1): 5'-3 attached terminal deoxyabasic moeity
  misc_feature (20)..(21): n stands for thymidine
  misc_feature (21)..(21): 3'-3 attached terminal deoxyabasic moeity
cacuaaagcaguggacaccnn

SEQ ID NO: 1620 - RNA, 21 nt, Artificial Sequence
  Description of Artificial Sequence:  siNA sense region
  misc_feature (1)..(1): 5'-3 attached terminal deoxyabasic moeity
  misc_feature (20)..(21): n stands for thymidine
  misc_feature (21)..(21): 3'-3 attached terminal deoxyabasic moeity
cuaaagcaguggacaccagnn

SEQ ID NO: 1621 - RNA, 21 nt, Artificial Sequence
  Description of Artificial Sequence:  siNA sense region
  misc_feature (1)..(1): 5'-3 attached terminal deoxyabasic moeity
  misc_feature (20)..(21): n stands for thymidine
  misc_feature (21)..(21): 3'-3 attached terminal deoxyabasic moeity
aagcaguggacaccaggagnn

SEQ ID NO: 1622 - RNA, 21 nt, Artificial Sequence
  Description of Artificial Sequence:  siNA sense region
  misc_feature (1)..(1): 5'-3 attached terminal deoxyabasic moeity
  misc_feature (20)..(21): n stands for thymidine
  misc_feature (21)..(21): 3'-3 attached terminal deoxyabasic moeity
aaggguaccuugaacacugnn

SEQ ID NO: 1623 - RNA, 21 nt, Artificial Sequence
  Description of Artificial Sequence:  siNA antisense region
  misc_feature (20)..(20): Phosphorothioate 3'-Internucleotide Linkage
  misc_feature (21)..(21): n stands for thymidine
gcagguccuuuacaaacugnn

SEQ ID NO: 1624 - RNA, 21 nt, Artificial Sequence
  Description of Artificial Sequence:  siNA antisense region
  misc_feature (20)..(20): Phosphorothioate 3'-Internucleotide Linkage
  misc_feature (21)..(21): n stands for thymidine
caguugccugugugugaagnn

SEQ ID NO: 1625 - RNA, 21 nt, Artificial Sequence
  Description of Artificial Sequence:  siNA antisense region
  misc_feature (20)..(20): Phosphorothioate 3'-Internucleotide Linkage
  misc_feature (21)..(21): n stands for thymidine
accaagaagaagugugccunn

SEQ ID NO: 1626 - RNA, 21 nt, Artificial Sequence
  Description of Artificial Sequence:  siNA antisense region
  misc_feature (20)..(20): Phosphorothioate 3'-Internucleotide Linkage
  misc_feature (21)..(21): n stands for thymidine
agugcuagcagccacagucnn

SEQ ID NO: 1627 - RNA, 21 nt, Artificial Sequence
  Description of Artificial Sequence:  siNA antisense region
  misc_feature (20)..(20): Phosphorothioate 3'-Internucleotide Linkage
  misc_feature (21)..(21): n stands for thymidine
gguguccacugcuuuagugnn

SEQ ID NO: 1628 - RNA, 21 nt, Artificial Sequence
  Description of Artificial Sequence:  siNA antisense region
  misc_feature (20)..(20): Phosphorothioate 3'-Internucleotide Linkage
  misc_feature (21)..(21): n stands for thymidine
cugguguccacugcuuuagnn

SEQ ID NO: 1629 - RNA, 21 nt, Artificial Sequence
  Description of Artificial Sequence:  siNA antisense region
  misc_feature (20)..(20): Phosphorothioate 3'-Internucleotide Linkage
  misc_feature (21)..(21): n stands for thymidine
cuccugguguccacugcuunn

SEQ ID NO: 1630 - RNA, 21 nt, Artificial Sequence
  Description of Artificial Sequence:  siNA antisense region
  misc_feature (20)..(20): Phosphorothioate 3'-Internucleotide Linkage
  misc_feature (21)..(21): n stands for thymidine
caguguucaagguacccuunn

SEQ ID NO: 1631 - RNA, 21 nt, Artificial Sequence
  Description of Artificial Sequence:  siNA sense region
  misc_feature (1)..(1): 5'-3 attached terminal deoxyabasic moeity
  misc_feature (20)..(21): n stands for thymidine
  misc_feature (21)..(21): 3'-3 attached terminal deoxyabasic moeity
uuguguguuauuuaaaugann

SEQ ID NO: 1632 - RNA, 21 nt, Artificial Sequence
  Description of Artificial Sequence:  siNA sense region
  misc_feature (1)..(1): 5'-3 attached terminal deoxyabasic moeity
  misc_feature (20)..(21): n stands for thymidine
  misc_feature (21)..(21): 3'-3 attached terminal deoxyabasic moeity
uguguguuauuuaaaugagnn

SEQ ID NO: 1633 - RNA, 21 nt, Artificial Sequence
  Description of Artificial Sequence:  siNA sense region
  misc_feature (1)..(1): 5'-3 attached terminal deoxyabasic moeity
  misc_feature (20)..(21): n stands for thymidine
  misc_feature (21)..(21): 3'-3 attached terminal deoxyabasic moeity
guguguuauuuaaaugagunn

SEQ ID NO: 1634 - RNA, 21 nt, Artificial Sequence
  Description of Artificial Sequence:  siNA sense region
  misc_feature (1)..(1): 5'-3 attached terminal deoxyabasic moeity
  misc_feature (20)..(21): n stands for thymidine
  misc_feature (21)..(21): 3'-3 attached terminal deoxyabasic moeity
auuguguguuauuuaaaugnn

SEQ ID NO: 1635 - RNA, 21 nt, Artificial Sequence
  Description of Artificial Sequence:  siNA sense region
  misc_feature (1)..(1): 5'-3 attached terminal deoxyabasic moeity
  misc_feature (20)..(21): n stands for thymidine
  misc_feature (21)..(21): 3'-3 attached terminal deoxyabasic moeity
caauggcagcaugguauggnn

SEQ ID NO: 1636 - RNA, 21 nt, Artificial Sequence
  Description of Artificial Sequence:  siNA sense region
  misc_feature (1)..(1): 5'-3 attached terminal deoxyabasic moeity
  misc_feature (20)..(21): n stands for thymidine
  misc_feature (21)..(21): 3'-3 attached terminal deoxyabasic moeity
aauggcagcaugguauggann

SEQ ID NO: 1637 - RNA, 21 nt, Artificial Sequence
  Description of Artificial Sequence:  siNA sense region
  misc_feature (1)..(1): 5'-3 attached terminal deoxyabasic moeity
  misc_feature (20)..(21): n stands for thymidine
  misc_feature (21)..(21): 3'-3 attached terminal deoxyabasic moeity
auggcagcaugguauggagnn

SEQ ID NO: 1638 - RNA, 21 nt, Artificial Sequence
  Description of Artificial Sequence:  siNA sense region
  misc_feature (1)..(1): 5'-3 attached terminal deoxyabasic moeity
  misc_feature (20)..(21): n stands for thymidine
  misc_feature (21)..(21): 3'-3 attached terminal deoxyabasic moeity
auuauuguguguuauuuaann

SEQ ID NO: 1639 - RNA, 21 nt, Artificial Sequence
  Description of Artificial Sequence:  siNA sense region
  misc_feature (1)..(1): 5'-3 attached terminal deoxyabasic moeity
  misc_feature (20)..(21): n stands for thymidine
  misc_feature (21)..(21): 3'-3 attached terminal deoxyabasic moeity
uuauuguguguuauuuaaann

SEQ ID NO: 1640 - RNA, 21 nt, Artificial Sequence
  Description of Artificial Sequence:  siNA sense region
  misc_feature (1)..(1): 5'-3 attached terminal deoxyabasic moeity
  misc_feature (20)..(21): n stands for thymidine
  misc_feature (21)..(21): 3'-3 attached terminal deoxyabasic moeity
uauuguguguuauuuaaaunn

SEQ ID NO: 1641 - RNA, 21 nt, Artificial Sequence
  Description of Artificial Sequence:  siNA sense region
  misc_feature (1)..(1): 5'-3 attached terminal deoxyabasic moeity
  misc_feature (20)..(21): n stands for thymidine
  misc_feature (21)..(21): 3'-3 attached terminal deoxyabasic moeity
caguuuguaaaggaccugcnn

SEQ ID NO: 1642 - RNA, 21 nt, Artificial Sequence
  Description of Artificial Sequence:  siNA sense region
  misc_feature (1)..(1): 5'-3 attached terminal deoxyabasic moeity
  misc_feature (20)..(21): n stands for thymidine
  misc_feature (21)..(21): 3'-3 attached terminal deoxyabasic moeity
cuucacacacaggcaacugnn

SEQ ID NO: 1643 - RNA, 21 nt, Artificial Sequence
  Description of Artificial Sequence:  siNA sense region
  misc_feature (1)..(1): 5'-3 attached terminal deoxyabasic moeity
  misc_feature (20)..(21): n stands for thymidine
  misc_feature (21)..(21): 3'-3 attached terminal deoxyabasic moeity
aggcacacuucuucuuggunn

SEQ ID NO: 1644 - RNA, 21 nt, Artificial Sequence
  Description of Artificial Sequence:  siNA sense region
  misc_feature (1)..(1): 5'-3 attached terminal deoxyabasic moeity
  misc_feature (20)..(21): n stands for thymidine
  misc_feature (21)..(21): 3'-3 attached terminal deoxyabasic moeity
gacuguggcugcuagcacunn

SEQ ID NO: 1645 - RNA, 21 nt, Artificial Sequence
  Description of Artificial Sequence:  siNA sense region
  misc_feature (1)..(1): 5'-3 attached terminal deoxyabasic moeity
  misc_feature (20)..(21): n stands for thymidine
  misc_feature (21)..(21): 3'-3 attached terminal deoxyabasic moeity
cacuaaagcaguggacaccnn

SEQ ID NO: 1646 - RNA, 21 nt, Artificial Sequence
  Description of Artificial Sequence:  siNA sense region
  misc_feature (1)..(1): 5'-3 attached terminal deoxyabasic moeity
  misc_feature (20)..(21): n stands for thymidine
  misc_feature (21)..(21): 3'-3 attached terminal deoxyabasic moeity
cuaaagcaguggacaccagnn

SEQ ID NO: 1647 - RNA, 21 nt, Artificial Sequence
  Description of Artificial Sequence:  siNA sense region
  misc_feature (1)..(1): 5'-3 attached terminal deoxyabasic moeity
  misc_feature (20)..(21): n stands for thymidine
  misc_feature (21)..(21): 3'-3 attached terminal deoxyabasic moeity
aagcaguggacaccaggagnn

SEQ ID NO: 1648 - RNA, 21 nt, Artificial Sequence
  Description of Artificial Sequence:  siNA sense region
  misc_feature (1)..(1): 5'-3 attached terminal deoxyabasic moeity
  misc_feature (20)..(21): n stands for thymidine
  misc_feature (21)..(21): 3'-3 attached terminal deoxyabasic moeity
aaggguaccuugaacacugnn

SEQ ID NO: 1649 - RNA, 21 nt, Artificial Sequence
  Description of Artificial Sequence:  siNA antisense region
  misc_feature (20)..(20): Phosphorothioate 3'-Internucleotide Linkage
  misc_feature (21)..(21): n stands for thymidine
gcagguccuuuacaaacugnn

SEQ ID NO: 1650 - RNA, 21 nt, Artificial Sequence
  Description of Artificial Sequence:  siNA antisense region
  misc_feature (20)..(20): Phosphorothioate 3'-Internucleotide Linkage
  misc_feature (21)..(21): n stands for thymidine
caguugccugugugugaagnn

SEQ ID NO: 1651 - RNA, 21 nt, Artificial Sequence
  Description of Artificial Sequence:  siNA antisense region
  misc_feature (20)..(20): Phosphorothioate 3'-Internucleotide Linkage
  misc_feature (21)..(21): n stands for thymidine
accaagaagaagugugccunn

SEQ ID NO: 1652 - RNA, 21 nt, Artificial Sequence
  Description of Artificial Sequence:  siNA antisense region
  misc_feature (20)..(20): Phosphorothioate 3'-Internucleotide Linkage
  misc_feature (21)..(21): n stands for thymidine
agugcuagcagccacagucnn

SEQ ID NO: 1653 - RNA, 21 nt, Artificial Sequence
  Description of Artificial Sequence:  siNA antisense region
  misc_feature (20)..(20): Phosphorothioate 3'-Internucleotide Linkage
  misc_feature (21)..(21): n stands for thymidine
gguguccacugcuuuagugnn

SEQ ID NO: 1654 - RNA, 21 nt, Artificial Sequence
  Description of Artificial Sequence:  siNA antisense region
  misc_feature (20)..(20): Phosphorothioate 3'-Internucleotide Linkage
  misc_feature (21)..(21): n stands for thymidine
cugguguccacugcuuuagnn

SEQ ID NO: 1655 - RNA, 21 nt, Artificial Sequence
  Description of Artificial Sequence:  siNA antisense region
  misc_feature (20)..(20): Phosphorothioate 3'-Internucleotide Linkage
  misc_feature (21)..(21): n stands for thymidine
cuccugguguccacugcuunn

SEQ ID NO: 1656 - RNA, 21 nt, Artificial Sequence
  Description of Artificial Sequence:  siNA antisense region
  misc_feature (20)..(20): Phosphorothioate 3'-Internucleotide Linkage
  misc_feature (21)..(21): n stands for thymidine
caguguucaagguacccuunn

SEQ ID NO: 1657 - RNA, 21 nt, Artificial Sequence
  Description of Artificial Sequence:  siNA sense region
  misc_feature (1)..(1): 5'-3 attached terminal deoxyabasic moeity
  misc_feature (20)..(21): n stands for thymidine
  misc_feature (21)..(21): 3'-3 attached terminal deoxyabasic moeity
caguuuguaaaggaccugcnn

SEQ ID NO: 1658 - RNA, 21 nt, Artificial Sequence
  Description of Artificial Sequence:  siNA sense region
  misc_feature (1)..(1): 5'-3 attached terminal deoxyabasic moeity
  misc_feature (20)..(21): n stands for thymidine
  misc_feature (21)..(21): 3'-3 attached terminal deoxyabasic moeity
cuucacacacaggcaacugnn

SEQ ID NO: 1659 - RNA, 21 nt, Artificial Sequence
  Description of Artificial Sequence:  siNA sense region
  misc_feature (1)..(1): 5'-3 attached terminal deoxyabasic moeity
  misc_feature (20)..(21): n stands for thymidine
  misc_feature (21)..(21): 3'-3 attached terminal deoxyabasic moeity
aggcacacuucuucuuggunn

SEQ ID NO: 1660 - RNA, 21 nt, Artificial Sequence
  Description of Artificial Sequence:  siNA sense region
  misc_feature (1)..(1): 5'-3 attached terminal deoxyabasic moeity
  misc_feature (20)..(21): n stands for thymidine
  misc_feature (21)..(21): 3'-3 attached terminal deoxyabasic moeity
gacuguggcugcuagcacunn

SEQ ID NO: 1661 - RNA, 21 nt, Artificial Sequence
  Description of Artificial Sequence:  siNA sense region
  misc_feature (1)..(1): 5'-3 attached terminal deoxyabasic moeity
  misc_feature (20)..(21): n stands for thymidine
  misc_feature (21)..(21): 3'-3 attached terminal deoxyabasic moeity
cacuaaagcaguggacaccnn

SEQ ID NO: 1662 - RNA, 21 nt, Artificial Sequence
  Description of Artificial Sequence:  siNA sense region
  misc_feature (1)..(1): 5'-3 attached terminal deoxyabasic moeity
  misc_feature (20)..(21): n stands for thymidine
  misc_feature (21)..(21): 3'-3 attached terminal deoxyabasic moeity
cuaaagcaguggacaccagnn

SEQ ID NO: 1663 - RNA, 21 nt, Artificial Sequence
  Description of Artificial Sequence:  siNA sense region
  misc_feature (1)..(1): 5'-3 attached terminal deoxyabasic moeity
  misc_feature (20)..(21): n stands for thymidine
  misc_feature (21)..(21): 3'-3 attached terminal deoxyabasic moeity
aagcaguggacaccaggagnn

SEQ ID NO: 1664 - RNA, 21 nt, Artificial Sequence
  Description of Artificial Sequence:  siNA sense region
  misc_feature (1)..(1): 5'-3 attached terminal deoxyabasic moeity
  misc_feature (20)..(21): n stands for thymidine
  misc_feature (21)..(21): 3'-3 attached terminal deoxyabasic moeity
aaggguaccuugaacacugnn

SEQ ID NO: 1665 - RNA, 21 nt, Artificial Sequence
  Description of Artificial Sequence:  siNA antisense region
  misc_feature (20)..(20): Phosphorothioate 3'-Internucleotide Linkage
  misc_feature (21)..(21): n stands for thymidine
ucauuuaaauaacacacaann

SEQ ID NO: 1666 - RNA, 21 nt, Artificial Sequence
  Description of Artificial Sequence:  siNA antisense region
  misc_feature (20)..(20): Phosphorothioate 3'-Internucleotide Linkage
  misc_feature (21)..(21): n stands for thymidine
cucauuuaaauaacacacann

SEQ ID NO: 1667 - RNA, 21 nt, Artificial Sequence
  Description of Artificial Sequence:  siNA antisense region
  misc_feature (20)..(20): Phosphorothioate 3'-Internucleotide Linkage
  misc_feature (21)..(21): n stands for thymidine
acucauuuaaauaacacacnn

SEQ ID NO: 1668 - RNA, 21 nt, Artificial Sequence
  Description of Artificial Sequence:  siNA antisense region
  misc_feature (20)..(20): Phosphorothioate 3'-Internucleotide Linkage
  misc_feature (21)..(21): n stands for thymidine
cauuuaaauaacacacaaunn

SEQ ID NO: 1669 - RNA, 21 nt, Artificial Sequence
  Description of Artificial Sequence:  siNA antisense region
  misc_feature (20)..(20): Phosphorothioate 3'-Internucleotide Linkage
  misc_feature (21)..(21): n stands for thymidine
ccauaccaugcugccauugnn

SEQ ID NO: 1670 - RNA, 21 nt, Artificial Sequence
  Description of Artificial Sequence:  siNA antisense region
  misc_feature (20)..(20): Phosphorothioate 3'-Internucleotide Linkage
  misc_feature (21)..(21): n stands for thymidine
uccauaccaugcugccauunn

SEQ ID NO: 1671 - RNA, 21 nt, Artificial Sequence
  Description of Artificial Sequence:  siNA antisense region
  misc_feature (20)..(20): Phosphorothioate 3'-Internucleotide Linkage
  misc_feature (21)..(21): n stands for thymidine
cuccauaccaugcugccaunn

SEQ ID NO: 1672 - RNA, 21 nt, Artificial Sequence
  Description of Artificial Sequence:  siNA antisense region
  misc_feature (20)..(20): Phosphorothioate 3'-Internucleotide Linkage
  misc_feature (21)..(21): n stands for thymidine
uuaaauaacacacaauaaunn

SEQ ID NO: 1673 - RNA, 21 nt, Artificial Sequence
  Description of Artificial Sequence:  siNA antisense region
  misc_feature (20)..(20): Phosphorothioate 3'-Internucleotide Linkage
  misc_feature (21)..(21): n stands for thymidine
uuuaaauaacacacaauaann

SEQ ID NO: 1674 - RNA, 21 nt, Artificial Sequence
  Description of Artificial Sequence:  siNA antisense region
  misc_feature (20)..(20): Phosphorothioate 3'-Internucleotide Linkage
  misc_feature (21)..(21): n stands for thymidine
auuuaaauaacacacaauann

SEQ ID NO: 1675 - RNA, 21 nt, Artificial Sequence
  Description of Artificial Sequence:  siNA antisense region
  misc_feature (20)..(20): Phosphorothioate 3'-Internucleotide Linkage
  misc_feature (21)..(21): n stands for thymidine
gcagguccuuuacaaacugnn

SEQ ID NO: 1676 - RNA, 21 nt, Artificial Sequence
  Description of Artificial Sequence:  siNA antisense region
  misc_feature (20)..(20): Phosphorothioate 3'-Internucleotide Linkage
  misc_feature (21)..(21): n stands for thymidine
caguugccugugugugaagnn

SEQ ID NO: 1677 - RNA, 21 nt, Artificial Sequence
  Description of Artificial Sequence:  siNA antisense region
  misc_feature (20)..(20): Phosphorothioate 3'-Internucleotide Linkage
  misc_feature (21)..(21): n stands for thymidine
accaagaagaagugugccunn

SEQ ID NO: 1678 - RNA, 21 nt, Artificial Sequence
  Description of Artificial Sequence:  siNA antisense region
  misc_feature (20)..(20): Phosphorothioate 3'-Internucleotide Linkage
  misc_feature (21)..(21): n stands for thymidine
agugcuagcagccacagucnn

SEQ ID NO: 1679 - RNA, 21 nt, Artificial Sequence
  Description of Artificial Sequence:  siNA antisense region
  misc_feature (20)..(20): Phosphorothioate 3'-Internucleotide Linkage
  misc_feature (21)..(21): n stands for thymidine
gguguccacugcuuuagugnn

SEQ ID NO: 1680 - RNA, 21 nt, Artificial Sequence
  Description of Artificial Sequence:  siNA antisense region
  misc_feature (20)..(20): Phosphorothioate 3'-Internucleotide Linkage
  misc_feature (21)..(21): n stands for thymidine
cugguguccacugcuuuagnn

SEQ ID NO: 1681 - RNA, 21 nt, Artificial Sequence
  Description of Artificial Sequence:  siNA antisense region
  misc_feature (20)..(20): Phosphorothioate 3'-Internucleotide Linkage
  misc_feature (21)..(21): n stands for thymidine
cuccugguguccacugcuunn

SEQ ID NO: 1682 - RNA, 21 nt, Artificial Sequence
  Description of Artificial Sequence:  siNA antisense region
  misc_feature (20)..(20): Phosphorothioate 3'-Internucleotide Linkage
  misc_feature (21)..(21): n stands for thymidine
caguguucaagguacccuunn

SEQ ID NO: 1683 - RNA, 21 nt, Artificial Sequence
  Description of Artificial Sequence:  siNA sense region
  misc_feature (1)..(1): 5'-3 attached terminal deoxyabasic moeity
  misc_feature (20)..(21): n stands for thymidine
  misc_feature (21)..(21): 3'-3 attached terminal deoxyabasic moeity
caguuuguaaaggaccugcnn

SEQ ID NO: 1684 - RNA, 21 nt, Artificial Sequence
  Description of Artificial Sequence:  siNA sense region
  misc_feature (1)..(1): 5'-3 attached terminal deoxyabasic moeity
  misc_feature (20)..(21): n stands for thymidine
  misc_feature (21)..(21): 3'-3 attached terminal deoxyabasic moeity
cuucacacacaggcaacugnn

SEQ ID NO: 1685 - RNA, 21 nt, Artificial Sequence
  Description of Artificial Sequence:  siNA sense region
  misc_feature (1)..(1): 5'-3 attached terminal deoxyabasic moeity
  misc_feature (20)..(21): n stands for thymidine
  misc_feature (21)..(21): 3'-3 attached terminal deoxyabasic moeity
aggcacacuucuucuuggunn

SEQ ID NO: 1686 - RNA, 21 nt, Artificial Sequence
  Description of Artificial Sequence:  siNA sense region
  misc_feature (1)..(1): 5'-3 attached terminal deoxyabasic moeity
  misc_feature (20)..(21): n stands for thymidine
  misc_feature (21)..(21): 3'-3 attached terminal deoxyabasic moeity
gacuguggcugcuagcacunn

SEQ ID NO: 1687 - RNA, 21 nt, Artificial Sequence
  Description of Artificial Sequence:  siNA sense region
  misc_feature (1)..(1): 5'-3 attached terminal deoxyabasic moeity
  misc_feature (20)..(21): n stands for thymidine
  misc_feature (21)..(21): 3'-3 attached terminal deoxyabasic moeity
cacuaaagcaguggacaccnn

SEQ ID NO: 1688 - RNA, 21 nt, Artificial Sequence
  Description of Artificial Sequence:  siNA sense region
  misc_feature (1)..(1): 5'-3 attached terminal deoxyabasic moeity
  misc_feature (20)..(21): n stands for thymidine
cuaaagcaguggacaccagnn

SEQ ID NO: 1689 - RNA, 21 nt, Artificial Sequence
  Description of Artificial Sequence:  siNA sense region
  misc_feature (1)..(1): 5'-3 attached terminal deoxyabasic moeity
  misc_feature (20)..(21): n stands for thymidine
  misc_feature (21)..(21): 3'-3 attached terminal deoxyabasic moeity
aagcaguggacaccaggagnn

SEQ ID NO: 1690 - RNA, 21 nt, Artificial Sequence
  Description of Artificial Sequence:  siNA sense region
  misc_feature (1)..(1): 5'-3 attached terminal deoxyabasic moeity
  misc_feature (20)..(21): n stands for thymidine
  misc_feature (21)..(21): 3'-3 attached terminal deoxyabasic moeity
aaggguaccuugaacacugnn

SEQ ID NO: 1691 - RNA, 21 nt, Artificial Sequence
  Description of Artificial Sequence:  siNA antisense region
  misc_feature (20)..(20): Phosphorothioate 3'-Internucleotide Linkage
  misc_feature (21)..(21): n stands for thymidine
gcagguccuuuacaaacugnn

SEQ ID NO: 1692 - RNA, 21 nt, Artificial Sequence
  Description of Artificial Sequence:  siNA antisense region
  misc_feature (20)..(20): Phosphorothioate 3'-Internucleotide Linkage
  misc_feature (21)..(21): n stands for thymidine
caguugccugugugugaagnn

SEQ ID NO: 1693 - RNA, 21 nt, Artificial Sequence
  Description of Artificial Sequence:  siNA antisense region
  misc_feature (20)..(20): Phosphorothioate 3'-Internucleotide Linkage
  misc_feature (21)..(21): n stands for thymidine
accaagaagaagugugccunn

SEQ ID NO: 1694 - RNA, 21 nt, Artificial Sequence
  Description of Artificial Sequence:  siNA antisense region
  misc_feature (20)..(20): Phosphorothioate 3'-Internucleotide Linkage
  misc_feature (21)..(21): n stands for thymidine
agugcuagcagccacagucnn

SEQ ID NO: 1695 - RNA, 21 nt, Artificial Sequence
  Description of Artificial Sequence:  siNA antisense region
  misc_feature (20)..(20): Phosphorothioate 3'-Internucleotide Linkage
  misc_feature (21)..(21): n stands for thymidine
gguguccacugcuuuagugnn

SEQ ID NO: 1696 - RNA, 21 nt, Artificial Sequence
  Description of Artificial Sequence:  siNA antisense region
  misc_feature (20)..(20): Phosphorothioate 3'-Internucleotide Linkage
  misc_feature (21)..(21): n stands for thymidine
cugguguccacugcuuuagnn

SEQ ID NO: 1697 - RNA, 21 nt, Artificial Sequence
  Description of Artificial Sequence:  siNA antisense region
  misc_feature (20)..(20): Phosphorothioate 3'-Internucleotide Linkage
  misc_feature (21)..(21): n stands for thymidine
cuccugguguccacugcuunn

SEQ ID NO: 1698 - RNA, 21 nt, Artificial Sequence
  Description of Artificial Sequence:  siNA antisense region
  misc_feature (20)..(20): Phosphorothioate 3'-Internucleotide Linkage
  misc_feature (21)..(21): n stands for thymidine
caguguucaagguacccuunn

SEQ ID NO: 1699 - RNA, 21 nt, Artificial Sequence
  Description of Artificial Sequence:  siNA antisense region
  misc_feature (20)..(21): n stands for thymidine
  misc_feature (21)..(21): 3'-3 attached terminal deoxyabasic moeity
gcagguccuuuacaaacugnn

SEQ ID NO: 1700 - RNA, 21 nt, Artificial Sequence
  Description of Artificial Sequence:  siNA antisense region
  misc_feature (20)..(21): n stands for thymidine
  misc_feature (21)..(21): 3'-3 attached terminal deoxyabasic moeity
caguugccugugugugaagnn

SEQ ID NO: 1701 - RNA, 21 nt, Artificial Sequence
  Description of Artificial Sequence:  siNA antisense region
  misc_feature (20)..(21): n stands for thymidine
  misc_feature (21)..(21): 3'-3 attached terminal deoxyabasic moeity
accaagaagaagugugccunn

SEQ ID NO: 1702 - RNA, 21 nt, Artificial Sequence
  Description of Artificial Sequence:  siNA antisense region
  misc_feature (20)..(21): n stands for thymidine
  misc_feature (21)..(21): 3'-3 attached terminal deoxyabasic moeity
agugcuagcagccacagucnn

SEQ ID NO: 1703 - RNA, 21 nt, Artificial Sequence
  Description of Artificial Sequence:  siNA antisense region
  misc_feature (20)..(21): n stands for thymidine
  misc_feature (21)..(21): 3'-3 attached terminal deoxyabasic moeity
gguguccacugcuuuagugnn

SEQ ID NO: 1704 - RNA, 21 nt, Artificial Sequence
  Description of Artificial Sequence:  siNA antisense region
  misc_feature (20)..(21): n stands for thymidine
  misc_feature (21)..(21): 3'-3 attached terminal deoxyabasic moeity
cugguguccacugcuuuagnn

SEQ ID NO: 1705 - RNA, 21 nt, Artificial Sequence
  Description of Artificial Sequence:  siNA antisense region
  misc_feature (20)..(21): n stands for thymidine
  misc_feature (21)..(21): 3'-3 attached terminal deoxyabasic moeity
cuccugguguccacugcuunn

SEQ ID NO: 1706 - RNA, 21 nt, Artificial Sequence
  Description of Artificial Sequence:  siNA antisense region
  misc_feature (20)..(21): n stands for thymidine
  misc_feature (21)..(21): 3'-3 attached terminal deoxyabasic moeity
caguguucaagguacccuunn

SEQ ID NO: 1707 - RNA, 21 nt, Artificial Sequence
  Description of Artificial Sequence:  siNA antisense region
  misc_feature (20)..(21): n stands for thymidine
  misc_feature (21)..(21): 3'-3 attached terminal deoxyabasic moeity
gcagguccuuuacaaacugnn

SEQ ID NO: 1708 - RNA, 21 nt, Artificial Sequence
  Description of Artificial Sequence:  siNA antisense region
  misc_feature (20)..(21): n stands for thymidine
  misc_feature (21)..(21): 3'-3 attached terminal deoxyabasic moeity
caguugccugugugugaagnn

SEQ ID NO: 1709 - RNA, 21 nt, Artificial Sequence
  Description of Artificial Sequence:  siNA antisense region
  misc_feature (20)..(21): n stands for thymidine
  misc_feature (21)..(21): 3'-3 attached terminal deoxyabasic moeity
accaagaagaagugugccunn

SEQ ID NO: 1710 - RNA, 21 nt, Artificial Sequence
  Description of Artificial Sequence:  siNA antisense region
  misc_feature (20)..(21): n stands for thymidine
  misc_feature (21)..(21): 3'-3 attached terminal deoxyabasic moeity
agugcuagcagccacagucnn

SEQ ID NO: 1711 - RNA, 21 nt, Artificial Sequence
  Description of Artificial Sequence:  siNA antisense region
  misc_feature (20)..(21): n stands for thymidine
  misc_feature (21)..(21): 3'-3 attached terminal deoxyabasic moeity
gguguccacugcuuuagugnn

SEQ ID NO: 1712 - RNA, 21 nt, Artificial Sequence
  Description of Artificial Sequence:  siNA antisense region
  misc_feature (20)..(21): n stands for thymidine
  misc_feature (21)..(21): 3'-3 attached terminal deoxyabasic moeity
cugguguccacugcuuuagnn

SEQ ID NO: 1713 - RNA, 21 nt, Artificial Sequence
  Description of Artificial Sequence:  siNA antisense region
  misc_feature (20)..(21): n stands for thymidine
  misc_feature (21)..(21): 3'-3 attached terminal deoxyabasic moeity
cuccugguguccacugcuunn

SEQ ID NO: 1714 - RNA, 21 nt, Artificial Sequence
  Description of Artificial Sequence:  siNA antisense region
  misc_feature (20)..(21): n stands for thymidine
  misc_feature (21)..(21): 3'-3 attached terminal deoxyabasic moeity
caguguucaagguacccuunn

SEQ ID NO: 1715 - RNA, 21 nt, Artificial Sequence
  Description of Artificial Sequence:  siNA sense region
  misc_feature (20)..(21): n stands for thymidine
ggugauccugagucugcugnn

SEQ ID NO: 1716 - RNA, 21 nt, Artificial Sequence
  Description of Artificial Sequence:  siNA sense region
  misc_feature (20)..(21): n stands for thymidine
gucaaggauaaugcaggaann

SEQ ID NO: 1717 - RNA, 21 nt, Artificial Sequence
  Description of Artificial Sequence:  siNA sense region
  misc_feature (20)..(21): n stands for thymidine
uccaagaggcuaaaugugann

SEQ ID NO: 1718 - RNA, 21 nt, Artificial Sequence
  Description of Artificial Sequence:  siNA sense region
  misc_feature (20)..(21): n stands for thymidine
aaaccgacucuguagugcunn

SEQ ID NO: 1719 - RNA, 21 nt, Artificial Sequence
  Description of Artificial Sequence:  siNA sense region
  misc_feature (20)..(21): n stands for thymidine
aagaaagccucucagugaunn

SEQ ID NO: 1720 - RNA, 21 nt, Artificial Sequence
  Description of Artificial Sequence:  siNA sense region
  misc_feature (20)..(21): n stands for thymidine
ugcaccauuuaaaaacaggnn

SEQ ID NO: 1721 - RNA, 21 nt, Artificial Sequence
  Description of Artificial Sequence:  siNA sense region
  misc_feature (20)..(21): n stands for thymidine
gcauuuuccucugcuuugann

SEQ ID NO: 1722 - RNA, 21 nt, Artificial Sequence
  Description of Artificial Sequence:  siNA sense region
  misc_feature (20)..(21): n stands for thymidine
aagaccuuucaaagccauunn

SEQ ID NO: 1723 - RNA, 21 nt, Artificial Sequence
  Description of Artificial Sequence:  siNA antisense region
  misc_feature (20)..(21): n stands for thymidine
cagcagacucaggaucaccnn

SEQ ID NO: 1724 - RNA, 21 nt, Artificial Sequence
  Description of Artificial Sequence:  siNA antisense region
  misc_feature (20)..(21): n stands for thymidine
uuccugcauuauccuugacnn

SEQ ID NO: 1725 - RNA, 21 nt, Artificial Sequence
  Description of Artificial Sequence:  siNA antisense region
  misc_feature (20)..(21): n stands for thymidine
ucacauuuagccucuuggann

SEQ ID NO: 1726 - RNA, 21 nt, Artificial Sequence
  Description of Artificial Sequence:  siNA antisense region
  misc_feature (20)..(21): n stands for thymidine
agcacuacagagucgguuunn

SEQ ID NO: 1727 - RNA, 21 nt, Artificial Sequence
  Description of Artificial Sequence:  siNA antisense region
  misc_feature (20)..(21): n stands for thymidine
aucacugagaggcuuucuunn

SEQ ID NO: 1728 - RNA, 21 nt, Artificial Sequence
  Description of Artificial Sequence:  siNA antisense region
  misc_feature (20)..(21): n stands for thymidine
ccuguuuuuaaauggugcann

SEQ ID NO: 1729 - RNA, 21 nt, Artificial Sequence
  Description of Artificial Sequence:  siNA antisense region
  misc_feature (20)..(21): n stands for thymidine
ucaaagcagaggaaaaugcnn

SEQ ID NO: 1730 - RNA, 21 nt, Artificial Sequence
  Description of Artificial Sequence:  siNA antisense region
  misc_feature (20)..(21): n stands for thymidine
aauggcuuugaaaggucuunn

SEQ ID NO: 1731 - RNA, 21 nt, Artificial Sequence
  Description of Artificial Sequence:  siNA sense region
  misc_feature (1)..(1): 5'-3 attached terminal deoxyabasic moeity
  misc_feature (20)..(21): n stands for thymidine
  misc_feature (21)..(21): 3'-3 attached terminal deoxyabasic moeity
ggugauccugagucugcugnn

SEQ ID NO: 1732 - RNA, 21 nt, Artificial Sequence
  Description of Artificial Sequence:  siNA sense region
  misc_feature (1)..(1): 5'-3 attached terminal deoxyabasic moeity
  misc_feature (20)..(21): n stands for thymidine
  misc_feature (21)..(21): 3'-3 attached terminal deoxyabasic moeity
gucaaggauaaugcaggaann

SEQ ID NO: 1733 - RNA, 21 nt, Artificial Sequence
  Description of Artificial Sequence:  siNA sense region
  misc_feature (1)..(1): 5'-3 attached terminal deoxyabasic moeity
  misc_feature (20)..(21): n stands for thymidine
  misc_feature (21)..(21): 3'-3 attached terminal deoxyabasic moeity
uccaagaggcuaaaugugann

SEQ ID NO: 1734 - RNA, 21 nt, Artificial Sequence
  Description of Artificial Sequence:  siNA sense region
  misc_feature (1)..(1): 5'-3 attached terminal deoxyabasic moeity
  misc_feature (20)..(21): n stands for thymidine
  misc_feature (21)..(21): 3'-3 attached terminal deoxyabasic moeity
aaaccgacucuguagugcunn

SEQ ID NO: 1735 - RNA, 21 nt, Artificial Sequence
  Description of Artificial Sequence:  siNA sense region
  misc_feature (1)..(1): 5'-3 attached terminal deoxyabasic moeity
  misc_feature (20)..(21): n stands for thymidine
  misc_feature (21)..(21): 3'-3 attached terminal deoxyabasic moeity
aagaaagccucucagugaunn

SEQ ID NO: 1736 - RNA, 21 nt, Artificial Sequence
  Description of Artificial Sequence:  siNA sense region
  misc_feature (1)..(1): 5'-3 attached terminal deoxyabasic moeity
  misc_feature (20)..(21): n stands for thymidine
  misc_feature (21)..(21): 3'-3 attached terminal deoxyabasic moeity
ugcaccauuuaaaaacaggnn

SEQ ID NO: 1737 - RNA, 21 nt, Artificial Sequence
  Description of Artificial Sequence:  siNA sense region
  misc_feature (1)..(1): 5'-3 attached terminal deoxyabasic moeity
  misc_feature (20)..(21): n stands for thymidine
  misc_feature (21)..(21): 3'-3 attached terminal deoxyabasic moeity
gcauuuuccucugcuuugann

SEQ ID NO: 1738 - RNA, 21 nt, Artificial Sequence
  Description of Artificial Sequence:  siNA sense region
  misc_feature (1)..(1): 5'-3 attached terminal deoxyabasic moeity
  misc_feature (20)..(21): n stands for thymidine
  misc_feature (21)..(21): 3'-3 attached terminal deoxyabasic moeity
aagaccuuucaaagccauunn

SEQ ID NO: 1739 - RNA, 21 nt, Artificial Sequence
  Description of Artificial Sequence:  siNA antisense region
  misc_feature (20)..(20): Phosphorothioate 3'-Internucleotide Linkage
  misc_feature (21)..(21): n stands for thymidine
cagcagacucaggaucaccnn

SEQ ID NO: 1740 - RNA, 21 nt, Artificial Sequence
  Description of Artificial Sequence:  siNA antisense region
  misc_feature (20)..(20): Phosphorothioate 3'-Internucleotide Linkage
  misc_feature (21)..(21): n stands for thymidine
uuccugcauuauccuugacnn

SEQ ID NO: 1741 - RNA, 21 nt, Artificial Sequence
  Description of Artificial Sequence:  siNA antisense region
  misc_feature (20)..(20): Phosphorothioate 3'-Internucleotide Linkage
  misc_feature (21)..(21): n stands for thymidine
ucacauuuagccucuuggann

SEQ ID NO: 1742 - RNA, 21 nt, Artificial Sequence
  Description of Artificial Sequence:  siNA antisense region
  misc_feature (20)..(20): Phosphorothioate 3'-Internucleotide Linkage
  misc_feature (21)..(21): n stands for thymidine
agcacuacagagucgguuunn

SEQ ID NO: 1743 - RNA, 21 nt, Artificial Sequence
  Description of Artificial Sequence:  siNA antisense region
  misc_feature (20)..(20): Phosphorothioate 3'-Internucleotide Linkage
  misc_feature (21)..(21): n stands for thymidine
aucacugagaggcuuucuunn

SEQ ID NO: 1744 - RNA, 21 nt, Artificial Sequence
  Description of Artificial Sequence:  siNA antisense region
  misc_feature (20)..(20): Phosphorothioate 3'-Internucleotide Linkage
  misc_feature (21)..(21): n stands for thymidine
ccuguuuuuaaauggugcann

SEQ ID NO: 1745 - RNA, 21 nt, Artificial Sequence
  Description of Artificial Sequence:  siNA antisense region
  misc_feature (20)..(20): Phosphorothioate 3'-Internucleotide Linkage
  misc_feature (21)..(21): n stands for thymidine
ucaaagcagaggaaaaugcnn

SEQ ID NO: 1746 - RNA, 21 nt, Artificial Sequence
  Description of Artificial Sequence:  siNA antisense region
  misc_feature (20)..(20): Phosphorothioate 3'-Internucleotide Linkage
  misc_feature (21)..(21): n stands for thymidine
aauggcuuugaaaggucuunn

SEQ ID NO: 1747 - RNA, 21 nt, Artificial Sequence
  Description of Artificial Sequence:  siNA sense region
  misc_feature (1)..(1): 5'-3 attached terminal deoxyabasic moeity
  misc_feature (20)..(21): n stands for thymidine
  misc_feature (21)..(21): 3'-3 attached terminal deoxyabasic moeity
ggugauccugagucugcugnn

SEQ ID NO: 1748 - RNA, 21 nt, Artificial Sequence
  Description of Artificial Sequence:  siNA sense region
  misc_feature (1)..(1): 5'-3 attached terminal deoxyabasic moeity
  misc_feature (20)..(21): n stands for thymidine
  misc_feature (21)..(21): 3'-3 attached terminal deoxyabasic moeity
gucaaggauaaugcaggaann

SEQ ID NO: 1749 - RNA, 21 nt, Artificial Sequence
  Description of Artificial Sequence:  siNA sense region
  misc_feature (1)..(1): 5'-3 attached terminal deoxyabasic moeity
  misc_feature (20)..(21): n stands for thymidine
  misc_feature (21)..(21): 3'-3 attached terminal deoxyabasic moeity
uccaagaggcuaaaugugann

SEQ ID NO: 1750 - RNA, 21 nt, Artificial Sequence
  Description of Artificial Sequence:  siNA sense region
  misc_feature (1)..(1): 5'-3 attached terminal deoxyabasic moeity
  misc_feature (20)..(21): n stands for thymidine
  misc_feature (21)..(21): 3'-3 attached terminal deoxyabasic moeity
aaaccgacucuguagugcunn

SEQ ID NO: 1751 - RNA, 21 nt, Artificial Sequence
  Description of Artificial Sequence:  siNA sense region
  misc_feature (1)..(1): 5'-3 attached terminal deoxyabasic moeity
  misc_feature (20)..(21): n stands for thymidine
  misc_feature (21)..(21): 3'-3 attached terminal deoxyabasic moeity
aagaaagccucucagugaunn

SEQ ID NO: 1752 - RNA, 21 nt, Artificial Sequence
  Description of Artificial Sequence:  siNA sense region
  misc_feature (1)..(1): 5'-3 attached terminal deoxyabasic moeity
  misc_feature (20)..(21): n stands for thymidine
  misc_feature (21)..(21): 3'-3 attached terminal deoxyabasic moeity
ugcaccauuuaaaaacaggnn

SEQ ID NO: 1753 - RNA, 21 nt, Artificial Sequence
  Description of Artificial Sequence:  siNA sense region
  misc_feature (1)..(1): 5'-3 attached terminal deoxyabasic moeity
  misc_feature (20)..(21): n stands for thymidine
  misc_feature (21)..(21): 3'-3 attached terminal deoxyabasic moeity
gcauuuuccucugcuuugann

SEQ ID NO: 1754 - RNA, 21 nt, Artificial Sequence
  Description of Artificial Sequence:  siNA sense region
  misc_feature (1)..(1): 5'-3 attached terminal deoxyabasic moeity
  misc_feature (20)..(21): n stands for thymidine
  misc_feature (21)..(21): 3'-3 attached terminal deoxyabasic moeity
aagaccuuucaaagccauunn

SEQ ID NO: 1755 - RNA, 21 nt, Artificial Sequence
  Description of Artificial Sequence:  siNA antisense region
  misc_feature (20)..(20): Phosphorothioate 3'-Internucleotide Linkage
  misc_feature (21)..(21): n stands for thymidine
cagcagacucaggaucaccnn

SEQ ID NO: 1756 - RNA, 21 nt, Artificial Sequence
  Description of Artificial Sequence:  siNA antisense region
  misc_feature (20)..(20): Phosphorothioate 3'-Internucleotide Linkage
  misc_feature (21)..(21): n stands for thymidine
uuccugcauuauccuugacnn

SEQ ID NO: 1757 - RNA, 21 nt, Artificial Sequence
  Description of Artificial Sequence:  siNA antisense region
  misc_feature (20)..(20): Phosphorothioate 3'-Internucleotide Linkage
  misc_feature (21)..(21): n stands for thymidine
ucacauuuagccucuuggann

SEQ ID NO: 1758 - RNA, 21 nt, Artificial Sequence
  Description of Artificial Sequence:  siNA antisense region
  misc_feature (20)..(20): Phosphorothioate 3'-Internucleotide Linkage
  misc_feature (21)..(21): n stands for thymidine
agcacuacagagucgguuunn

SEQ ID NO: 1759 - RNA, 21 nt, Artificial Sequence
  Description of Artificial Sequence:  siNA antisense region
  misc_feature (20)..(20): Phosphorothioate 3'-Internucleotide Linkage
  misc_feature (21)..(21): n stands for thymidine
aucacugagaggcuuucuunn

SEQ ID NO: 1760 - RNA, 21 nt, Artificial Sequence
  Description of Artificial Sequence:  siNA antisense region
  misc_feature (20)..(20): Phosphorothioate 3'-Internucleotide Linkage
  misc_feature (21)..(21): n stands for thymidine
ccuguuuuuaaauggugcann

SEQ ID NO: 1761 - RNA, 21 nt, Artificial Sequence
  Description of Artificial Sequence:  siNA antisense region
  misc_feature (20)..(20): Phosphorothioate 3'-Internucleotide Linkage
  misc_feature (21)..(21): n stands for thymidine
ucaaagcagaggaaaaugcnn

SEQ ID NO: 1762 - RNA, 21 nt, Artificial Sequence
  Description of Artificial Sequence:  siNA antisense region
  misc_feature (20)..(20): Phosphorothioate 3'-Internucleotide Linkage
  misc_feature (21)..(21): n stands for thymidine
aauggcuuugaaaggucuunn

SEQ ID NO: 1763 - RNA, 21 nt, Artificial Sequence
  Description of Artificial Sequence:  siNA sense region
  misc_feature (1)..(1): 5'-3 attached terminal deoxyabasic moeity
  misc_feature (20)..(21): n stands for thymidine
  misc_feature (21)..(21): 3'-3 attached terminal deoxyabasic moeity
ggugauccugagucugcugnn

SEQ ID NO: 1764 - RNA, 21 nt, Artificial Sequence
  Description of Artificial Sequence:  siNA sense region
  misc_feature (1)..(1): 5'-3 attached terminal deoxyabasic moeity
  misc_feature (20)..(21): n stands for thymidine
  misc_feature (21)..(21): 3'-3 attached terminal deoxyabasic moeity
gucaaggauaaugcaggaann

SEQ ID NO: 1765 - RNA, 21 nt, Artificial Sequence
  Description of Artificial Sequence:  siNA sense region
  misc_feature (1)..(1): 5'-3 attached terminal deoxyabasic moeity
  misc_feature (20)..(21): n stands for thymidine
  misc_feature (21)..(21): 3'-3 attached terminal deoxyabasic moeity
uccaagaggcuaaaugugann

SEQ ID NO: 1766 - RNA, 21 nt, Artificial Sequence
  Description of Artificial Sequence:  siNA sense region
  misc_feature (1)..(1): 5'-3 attached terminal deoxyabasic moeity
  misc_feature (20)..(21): n stands for thymidine
  misc_feature (21)..(21): 3'-3 attached terminal deoxyabasic moeity
aaaccgacucuguagugcunn

SEQ ID NO: 1767 - RNA, 21 nt, Artificial Sequence
  Description of Artificial Sequence:  siNA sense region
  misc_feature (1)..(1): 5'-3 attached terminal deoxyabasic moeity
  misc_feature (20)..(21): n stands for thymidine
  misc_feature (21)..(21): 3'-3 attached terminal deoxyabasic moeity
aagaaagccucucagugaunn

SEQ ID NO: 1768 - RNA, 21 nt, Artificial Sequence
  Description of Artificial Sequence:  siNA sense region
  misc_feature (1)..(1): 5'-3 attached terminal deoxyabasic moeity
  misc_feature (20)..(21): n stands for thymidine
  misc_feature (21)..(21): 3'-3 attached terminal deoxyabasic moeity
ugcaccauuuaaaaacaggnn

SEQ ID NO: 1769 - RNA, 21 nt, Artificial Sequence
  Description of Artificial Sequence:  siNA sense region
  misc_feature (1)..(1): 5'-3 attached terminal deoxyabasic moeity
  misc_feature (20)..(21): n stands for thymidine
  misc_feature (21)..(21): 3'-3 attached terminal deoxyabasic moeity
gcauuuuccucugcuuugann

SEQ ID NO: 1770 - RNA, 21 nt, Artificial Sequence
  Description of Artificial Sequence:  siNA sense region
  misc_feature (1)..(1): 5'-3 attached terminal deoxyabasic moeity
  misc_feature (20)..(21): n stands for thymidine
  misc_feature (21)..(21): 3'-3 attached terminal deoxyabasic moeity
aagaccuuucaaagccauunn

SEQ ID NO: 1771 - RNA, 21 nt, Artificial Sequence
  Description of Artificial Sequence:  siNA antisense region
  misc_feature (20)..(20): Phosphorothioate 3'-Internucleotide Linkage
  misc_feature (21)..(21): n stands for thymidine
cagcagacucaggaucaccnn

SEQ ID NO: 1772 - RNA, 21 nt, Artificial Sequence
  Description of Artificial Sequence:  siNA antisense region
  misc_feature (20)..(20): Phosphorothioate 3'-Internucleotide Linkage
  misc_feature (21)..(21): n stands for thymidine
uuccugcauuauccuugacnn

SEQ ID NO: 1773 - RNA, 21 nt, Artificial Sequence
  Description of Artificial Sequence:  siNA antisense region
  misc_feature (20)..(20): Phosphorothioate 3'-Internucleotide Linkage
  misc_feature (21)..(21): n stands for thymidine
ucacauuuagccucuuggann

SEQ ID NO: 1774 - RNA, 21 nt, Artificial Sequence
  Description of Artificial Sequence:  siNA antisense region
  misc_feature (20)..(20): Phosphorothioate 3'-Internucleotide Linkage
  misc_feature (21)..(21): n stands for thymidine
agcacuacagagucgguuunn

SEQ ID NO: 1775 - RNA, 21 nt, Artificial Sequence
  Description of Artificial Sequence:  siNA antisense region
  misc_feature (20)..(20): Phosphorothioate 3'-Internucleotide Linkage
  misc_feature (21)..(21): n stands for thymidine
aucacugagaggcuuucuunn

SEQ ID NO: 1776 - RNA, 21 nt, Artificial Sequence
  Description of Artificial Sequence:  siNA antisense region
  misc_feature (20)..(20): Phosphorothioate 3'-Internucleotide Linkage
  misc_feature (21)..(21): n stands for thymidine
ccuguuuuuaaauggugcann

SEQ ID NO: 1777 - RNA, 21 nt, Artificial Sequence
  Description of Artificial Sequence:  siNA antisense region
  misc_feature (20)..(20): Phosphorothioate 3'-Internucleotide Linkage
  misc_feature (21)..(21): n stands for thymidine
ucaaagcagaggaaaaugcnn

SEQ ID NO: 1778 - RNA, 21 nt, Artificial Sequence
  Description of Artificial Sequence:  siNA antisense region
  misc_feature (20)..(20): Phosphorothioate 3'-Internucleotide Linkage
  misc_feature (21)..(21): n stands for thymidine
aauggcuuugaaaggucuunn

SEQ ID NO: 1779 - RNA, 21 nt, Artificial Sequence
  Description of Artificial Sequence:  siNA sense region
  misc_feature (1)..(1): 5'-3 attached terminal deoxyabasic moeity
  misc_feature (20)..(21): n stands for thymidine
  misc_feature (21)..(21): 3'-3 attached terminal deoxyabasic moeity
ggugauccugagucugcugnn

SEQ ID NO: 1780 - RNA, 21 nt, Artificial Sequence
  Description of Artificial Sequence:  siNA sense region
  misc_feature (1)..(1): 5'-3 attached terminal deoxyabasic moeity
  misc_feature (20)..(21): n stands for thymidine
  misc_feature (21)..(21): 3'-3 attached terminal deoxyabasic moeity
gucaaggauaaugcaggaann

SEQ ID NO: 1781 - RNA, 21 nt, Artificial Sequence
  Description of Artificial Sequence:  siNA sense region
  misc_feature (1)..(1): 5'-3 attached terminal deoxyabasic moeity
  misc_feature (20)..(21): n stands for thymidine
  misc_feature (21)..(21): 3'-3 attached terminal deoxyabasic moeity
uccaagaggcuaaaugugann

SEQ ID NO: 1782 - RNA, 21 nt, Artificial Sequence
  Description of Artificial Sequence:  siNA sense region
  misc_feature (1)..(1): 5'-3 attached terminal deoxyabasic moeity
  misc_feature (20)..(21): n stands for thymidine
  misc_feature (21)..(21): 3'-3 attached terminal deoxyabasic moeity
aaaccgacucuguagugcunn

SEQ ID NO: 1783 - RNA, 21 nt, Artificial Sequence
  Description of Artificial Sequence:  siNA sense region
  misc_feature (1)..(1): 5'-3 attached terminal deoxyabasic moeity
  misc_feature (20)..(21): n stands for thymidine
  misc_feature (21)..(21): 3'-3 attached terminal deoxyabasic moeity
aagaaagccucucagugaunn

SEQ ID NO: 1784 - RNA, 21 nt, Artificial Sequence
  Description of Artificial Sequence:  siNA sense region
  misc_feature (1)..(1): 5'-3 attached terminal deoxyabasic moeity
  misc_feature (20)..(21): n stands for thymidine
  misc_feature (21)..(21): 3'-3 attached terminal deoxyabasic moeity
ugcaccauuuaaaaacaggnn

SEQ ID NO: 1785 - RNA, 21 nt, Artificial Sequence
  Description of Artificial Sequence:  siNA sense region
  misc_feature (1)..(1): 5'-3 attached terminal deoxyabasic moeity
  misc_feature (20)..(21): n stands for thymidine
  misc_feature (21)..(21): 3'-3 attached terminal deoxyabasic moeity
gcauuuuccucugcuuugann

SEQ ID NO: 1786 - RNA, 21 nt, Artificial Sequence
  Description of Artificial Sequence:  siNA sense region
  misc_feature (1)..(1): 5'-3 attached terminal deoxyabasic moeity
  misc_feature (20)..(21): n stands for thymidine
  misc_feature (21)..(21): 3'-3 attached terminal deoxyabasic moeity
aagaccuuucaaagccauunn

SEQ ID NO: 1787 - RNA, 21 nt, Artificial Sequence
  Description of Artificial Sequence:  siNA antisense region
  misc_feature (20)..(20): Phosphorothioate 3'-Internucleotide Linkage
  misc_feature (21)..(21): n stands for thymidine
cagcagacucaggaucaccnn

SEQ ID NO: 1788 - RNA, 21 nt, Artificial Sequence
  Description of Artificial Sequence:  siNA antisense region
  misc_feature (20)..(20): Phosphorothioate 3'-Internucleotide Linkage
  misc_feature (21)..(21): n stands for thymidine
uuccugcauuauccuugacnn

SEQ ID NO: 1789 - RNA, 21 nt, Artificial Sequence
  Description of Artificial Sequence:  siNA antisense region
  misc_feature (20)..(20): Phosphorothioate 3'-Internucleotide Linkage
  misc_feature (21)..(21): n stands for thymidine
ucacauuuagccucuuggann

SEQ ID NO: 1790 - RNA, 21 nt, Artificial Sequence
  Description of Artificial Sequence:  siNA antisense region
  misc_feature (20)..(20): Phosphorothioate 3'-Internucleotide Linkage
  misc_feature (21)..(21): n stands for thymidine
agcacuacagagucgguuunn

SEQ ID NO: 1791 - RNA, 21 nt, Artificial Sequence
  Description of Artificial Sequence:  siNA antisense region
  misc_feature (20)..(20): Phosphorothioate 3'-Internucleotide Linkage
  misc_feature (21)..(21): n stands for thymidine
aucacugagaggcuuucuunn

SEQ ID NO: 1792 - RNA, 21 nt, Artificial Sequence
  Description of Artificial Sequence:  siNA antisense region
  misc_feature (20)..(20): Phosphorothioate 3'-Internucleotide Linkage
  misc_feature (21)..(21): n stands for thymidine
ccuguuuuuaaauggugcann

SEQ ID NO: 1793 - RNA, 21 nt, Artificial Sequence
  Description of Artificial Sequence:  siNA antisense region
  misc_feature (20)..(20): Phosphorothioate 3'-Internucleotide Linkage
  misc_feature (21)..(21): n stands for thymidine
ucaaagcagaggaaaaugcnn

SEQ ID NO: 1794 - RNA, 21 nt, Artificial Sequence
  Description of Artificial Sequence:  siNA antisense region
  misc_feature (20)..(20): Phosphorothioate 3'-Internucleotide Linkage
  misc_feature (21)..(21): n stands for thymidine
aauggcuuugaaaggucuunn

SEQ ID NO: 1795 - RNA, 21 nt, Artificial Sequence
  Description of Artificial Sequence:  siNA antisense region
  misc_feature (20)..(21): n stands for thymidine
  misc_feature (21)..(21): 3'-3 attached terminal deoxyabasic moeity
cagcagacucaggaucaccnn

SEQ ID NO: 1796 - RNA, 21 nt, Artificial Sequence
  Description of Artificial Sequence:  siNA antisense region
  misc_feature (20)..(21): n stands for thymidine
  misc_feature (21)..(21): 3'-3 attached terminal deoxyabasic moeity
uuccugcauuauccuugacnn

SEQ ID NO: 1797 - RNA, 21 nt, Artificial Sequence
  Description of Artificial Sequence:  siNA antisense region
  misc_feature (20)..(21): n stands for thymidine
  misc_feature (21)..(21): 3'-3 attached terminal deoxyabasic moeity
ucacauuuagccucuuggann

SEQ ID NO: 1798 - RNA, 21 nt, Artificial Sequence
  Description of Artificial Sequence:  siNA antisense region
  misc_feature (20)..(21): n stands for thymidine
  misc_feature (21)..(21): 3'-3 attached terminal deoxyabasic moeity
agcacuacagagucgguuunn

SEQ ID NO: 1799 - RNA, 21 nt, Artificial Sequence
  Description of Artificial Sequence:  siNA antisense region
  misc_feature (20)..(21): n stands for thymidine
  misc_feature (21)..(21): 3'-3 attached terminal deoxyabasic moeity
aucacugagaggcuuucuunn

SEQ ID NO: 1800 - RNA, 21 nt, Artificial Sequence
  Description of Artificial Sequence:  siNA antisense region
  misc_feature (20)..(21): n stands for thymidine
  misc_feature (21)..(21): 3'-3 attached terminal deoxyabasic moeity
ccuguuuuuaaauggugcann

SEQ ID NO: 1801 - RNA, 21 nt, Artificial Sequence
  Description of Artificial Sequence:  siNA antisense region
  misc_feature (20)..(21): n stands for thymidine
  misc_feature (21)..(21): 3'-3 attached terminal deoxyabasic moeity
ucaaagcagaggaaaaugcnn

SEQ ID NO: 1802 - RNA, 21 nt, Artificial Sequence
  Description of Artificial Sequence:  siNA antisense region
  misc_feature (20)..(21): n stands for thymidine
  misc_feature (21)..(21): 3'-3 attached terminal deoxyabasic moeity
aauggcuuugaaaggucuunn

SEQ ID NO: 1803 - RNA, 21 nt, Artificial Sequence
  Description of Artificial Sequence:  siNA antisense region
  misc_feature (20)..(21): n stands for thymidine
  misc_feature (21)..(21): 3'-3 attached terminal deoxyabasic moeity
cagcagacucaggaucaccnn

SEQ ID NO: 1804 - RNA, 21 nt, Artificial Sequence
  Description of Artificial Sequence:  siNA antisense region
  misc_feature (20)..(21): n stands for thymidine
  misc_feature (21)..(21): 3'-3 attached terminal deoxyabasic moeity
uuccugcauuauccuugacnn

SEQ ID NO: 1805 - RNA, 21 nt, Artificial Sequence
  Description of Artificial Sequence:  siNA antisense region
  misc_feature (20)..(21): n stands for thymidine
  misc_feature (21)..(21): 3'-3 attached terminal deoxyabasic moeity
ucacauuuagccucuuggann

SEQ ID NO: 1806 - RNA, 21 nt, Artificial Sequence
  Description of Artificial Sequence:  siNA antisense region
  misc_feature (20)..(21): n stands for thymidine
  misc_feature (21)..(21): 3'-3 attached terminal deoxyabasic moeity
agcacuacagagucgguuunn

SEQ ID NO: 1807 - RNA, 21 nt, Artificial Sequence
  Description of Artificial Sequence:  siNA antisense region
  misc_feature (20)..(21): n stands for thymidine
  misc_feature (21)..(21): 3'-3 attached terminal deoxyabasic moeity
aucacugagaggcuuucuunn

SEQ ID NO: 1808 - RNA, 21 nt, Artificial Sequence
  Description of Artificial Sequence:  siNA antisense region
  misc_feature (20)..(21): n stands for thymidine
  misc_feature (21)..(21): 3'-3 attached terminal deoxyabasic moeity
ccuguuuuuaaauggugcann

SEQ ID NO: 1809 - RNA, 21 nt, Artificial Sequence
  Description of Artificial Sequence:  siNA antisense region
  misc_feature (20)..(21): n stands for thymidine
  misc_feature (21)..(21): 3'-3 attached terminal deoxyabasic moeity
ucaaagcagaggaaaaugcnn

SEQ ID NO: 1810 - RNA, 21 nt, Artificial Sequence
  Description of Artificial Sequence:  siNA antisense region
  misc_feature (20)..(21): n stands for thymidine
  misc_feature (21)..(21): 3'-3 attached terminal deoxyabasic moeity
aauggcuuugaaaggucuunn

SEQ ID NO: 1811 - RNA, 21 nt, Artificial Sequence
  Description of Artificial Sequence:  siNA sense region
  misc_feature (1)..(1): 5'-3 attached terminal deoxyabasic moeity inverted abasic, inverted nucleotide or other terminal cap that is optionally present
  misc_feature (21)..(21): 3'-3 attached terminal deoxyabasic moeity inverted abasic, inverted nucleotide or other terminal cap that is optionally present
  misc_feature (20)..(21): n stands for any nucleotide
nnnnnnnnnnnnnnnnnnnnn

SEQ ID NO: 1812 - RNA, 21 nt, Artificial Sequence
  Description of Artificial Sequence:  siNA antisense region
  misc_feature (20)..(20): Phosphorothioate or Phosphorodithioate 3'-Internucleotide Linkage (optionally absent)
  misc_feature (20)..(21): n stands for any nucleotide
  misc_feature (21)..(21): 3'-3 attached terminal glyceryl moeity or inverted deoxyabasic (optionally present)
nnnnnnnnnnnnnnnnnnnnn

SEQ ID NO: 1813 - RNA, 21 nt, Artificial Sequence
  Description of Artificial Sequence:  siNA sense region
  misc_feature (1)..(19): n stands for any nucleotide wherein any pyrimidine nucleotide present is 2'-Fluoro and all purine nucleotide is 2'-o-methly
  misc_feature (20)..(20): Phosphorothioate or Phosphorodithioate 3'-Internucleotide Linkage (optionally absent)
  misc_feature (20)..(21): n stands for any nucleotide
nnnnnnnnnnnnnnnnnnnnn

SEQ ID NO: 1814 - RNA, 21 nt, Artificial Sequence
  Description of Artificial Sequence:  siNA antisense region
  misc_feature (1)..(19): n stands for any nucleotide wherein any pyrimidine nucleotide present is 2'-Fluoro and all purine nucleotides are 2'-o-methyl
  misc_feature (20)..(20): Phosphorothioate or Phosphorodithioate 3'-Internucleotide Linkage (optionally absent)
  misc_feature (20)..(21): n stands for any nucleotide
  misc_feature (21)..(21): 3'-3 attached terminal glyceryl moeity or inverted deoxyabasic (optionally present)
nnnnnnnnnnnnnnnnnnnnn

SEQ ID NO: 1815 - RNA, 21 nt, Artificial Sequence
  Description of Artificial Sequence:  siNA sense region
  misc_feature (1)..(19): n stands for any nucleotide wherein any pyrimidine nucleotide present is 2'-O-methyl or 2'-Fluoro
  misc_feature (20)..(21): n stands for any nucleotide
  misc_feature (1)..(1): 5'-3 attached terminal deoxyabasic moeity, inverted abasic, inverted nucleotide or other terminal cap that is optionally present
  misc_feature (21)..(21): 3'-3 attached terminal deoxyabasic moeity, inverted abasic, inverted nucleotide or other terminal cap that is optionally present
nnnnnnnnnnnnnnnnnnnnn

SEQ ID NO: 1816 - RNA, 21 nt, Artificial Sequence
  Description of Artificial Sequence:  siNA antisense region
  misc_feature (1)..(19): n stands for any nucleotide wherein any pyrimidine nucleotide present is 2'-Fluoro
  misc_feature (20)..(20): Phosphorothioate or Phosphorodithioate 3'-Internucleotide Linkage (optionally absent)
  misc_feature (20)..(21): n stands for any nucleotide
  misc_feature (21)..(21): 3'-3 attached terminal glyceryl moeity or inverted deoxyabasic (optionally present)
nnnnnnnnnnnnnnnnnnnnn

SEQ ID NO: 1817 - RNA, 21 nt, Artificial Sequence
  Description of Artificial Sequence:  siNA sense region
  misc_feature (1)..(19): n stands for any nucleotide wherein any pyrimidine nucleotide present is 2'-Fluoro and any purine nucleotide present is 2'-Deoxy
  misc_feature (20)..(21): n stands for any nucleotide
  misc_feature (1)..(1): 5'-3 attached terminal deoxyabasic moeity, inverted abasic, inverted nucleotide or other terminal cap that is optionally present
  misc_feature (21)..(21): 3'-3 attached terminal deoxyabasic moeity, inverted abasic, inverted nucleotide or other terminal cap that is optionally present
nnnnnnnnnnnnnnnnnnnnn

SEQ ID NO: 1818 - RNA, 21 nt, Artificial Sequence
  Description of Artificial Sequence:  siNA sense region
  misc_feature (1)..(19): n stands for any nucleotide wherein any pyrimidine nucleotide present is 2'-Fluoro
  misc_feature (20)..(21): n stands for any nucleotide
  misc_feature (1)..(1): 5'-3 attached terminal deoxyabasic moeity, inverted abasic, inverted nucleotide or other terminal cap that is optionally present
  misc_feature (21)..(21): 3'-3 attached terminal deoxyabasic moeity, inverted abasic, inverted nucleotide or other terminal cap that is optionally present
nnnnnnnnnnnnnnnnnnnnn

SEQ ID NO: 1819 - RNA, 21 nt, Artificial Sequence
  Description of Artificial Sequence:  siNA antisense region
  misc_feature (1)..(19): n stands for any nucleotide wherein any pyrimidine nucleotide present is 2'-Fluoro and any purine nucleotide present is 2'-deoxy
  misc_feature (20)..(21): n stands for any nucleotide
  misc_feature (20)..(20): Phosphorothioate or Phosphorodithioate 3'-Internucleotide Linkage (optionally absent)
  misc_feature (21)..(21): 3'-3 attached terminal glyceryl moeity or inverted deoxyabasic (optionally present)
nnnnnnnnnnnnnnnnnnnnn

SEQ ID NO: 1820 - RNA, 21 nt, Artificial Sequence
  Description of Artificial Sequence:  siNA sense region
  misc_feature (1)..(1): 5'-3 attached terminal deoxyabasic moeity, inverted abasic, inverted nucleotide or other terminal cap that is optionally present
  misc_feature (21)..(21): 3'-3 attached terminal deoxyabasic moeity, inverted abasic, inverted nucleotide or other terminal cap that is optionally present
  misc_feature (20)..(21): n stands for thymidine
gggcgcugcugcucugcgcnn

SEQ ID NO: 1821 - RNA, 21 nt, Artificial Sequence
  Description of Artificial Sequence:  siNA antisense region
  misc_feature (20)..(20): Phosphorothioate or Phosphorodithioate 3'-Internucleotide Linkage (optionally present)
  misc_feature (20)..(21): n stands for thymidine
  misc_feature (21)..(21): 3'-3 attached terminal glyceryl moeity or inverted deoxyabasic (optionally present)
gcgcagagcagcagcgcccnn

SEQ ID NO: 1822 - RNA, 21 nt, Artificial Sequence
  Description of Artificial Sequence:  siNA sense region
  misc_feature (1)..(3): 2'-O-Methyl
  misc_feature (5)..(5): 2'-O-Methyl
  misc_feature (8)..(8): 2'-O-Methyl
  misc_feature (11)..(11): 2'-O-Methyl
  misc_feature (16)..(16): 2'-O-Methyl
  misc_feature (18)..(18): 2'-O-Methyl
  misc_feature (4)..(4): 2'-deoxy-2'-Fluoro
  misc_feature (6)..(7): 2'-deoxy-2'-Fluoro
  misc_feature (9)..(10): 2'-deoxy-2'-Fluoro
  misc_feature (12)..(15): 2'-deoxy-2'-Fluoro
  misc_feature (17)..(17): 2'-deoxy-2'-Fluoro
  misc_feature (19)..(19): 2'-deoxy-2'-Fluoro
  misc_feature (20)..(20): Phosphorothioate or Phosphorodithioate 3'-Internucleotide Linkage (optionally present)
  misc_feature (20)..(21): n stands for thymidine
gggcgcugcugcucugcgcnn

SEQ ID NO: 1823 - RNA, 21 nt, Artificial Sequence
  Description of Artificial Sequence:  siNA antisense region
  misc_feature (1)..(1): 2'-O-Methyl
  misc_feature (3)..(3): 2'-O-Methyl
  misc_feature (5)..(8): 2'-O-Methyl
  misc_feature (10)..(11): 2'-O-Methyl
  misc_feature (13)..(14): 2'-O-Methyl
  misc_feature (16)..(16): 2'-O-Methyl
  misc_feature (2)..(2): 2'-deoxy-2'-Fluoro
  misc_feature (4)..(4): 2'-deoxy-2'-Fluoro
  misc_feature (9)..(9): 2'-deoxy-2'-Fluoro
  misc_feature (12)..(12): 2'-deoxy-2'-Fluoro
  misc_feature (15)..(15): 2'-deoxy-2'-Fluoro
  misc_feature (17)..(19): 2'-deoxy-2'-Fluoro
  misc_feature (20)..(21): n stands for thymidine
  misc_feature (20)..(20): Phosphorothioate or Phosphorodithioate 3'-Internucleotide Linkage (optionally present)
  misc_feature (21)..(21): 3'-3 attached terminal glyceryl moeity or inverted deoxyabasic (optionally present)
gcgcagagcagcagcgcccnn

SEQ ID NO: 1824 - RNA, 21 nt, Artificial Sequence
  Description of Artificial Sequence:  siNA sense region
  misc_feature (4)..(4): 2'-O-Methyl or 2'-deoxy-2'-Fluoro
  misc_feature (6)..(7): 2'-O-Methyl or 2'-deoxy-2'-Fluoro
  misc_feature (9)..(10): 2'-O-Methyl or 2'-deoxy-2'-Fluoro
  misc_feature (12)..(15): 2'-O-Methyl or 2'-deoxy-2'-Fluoro
  misc_feature (17)..(17): 2'-O-Methyl or 2'-deoxy-2'-Fluoro
  misc_feature (19)..(19): 2'-O-Methyl or 2'-deoxy-2'-Fluoro
  misc_feature (1)..(1): 5'-3 attached terminal deoxyabasic moeity, inverted abasic, inverted nucleotide or other terminal cap that is optionally present
  misc_feature (21)..(21): 3'-3 attached terminal deoxyabasic moeity, inverted abasic, inverted nucleotide or other terminal cap that is optionally present
  misc_feature (20)..(21): n stands for thymidine
gggcgcugcugcucugcgcnn

SEQ ID NO: 1825 - RNA, 21 nt, Artificial Sequence
  Description of Artificial Sequence:  siNA antisense region
  misc_feature (2)..(2): 2'-deoxy-2'-Fluoro
  misc_feature (4)..(4): 2'-deoxy-2'-Fluoro
  misc_feature (9)..(9): 2'-deoxy-2'-Fluoro
  misc_feature (12)..(12): 2'-deoxy-2'-Fluoro
  misc_feature (15)..(15): 2'-deoxy-2'-Fluoro
  misc_feature (17)..(19): 2'-deoxy-2'-Fluoro
  misc_feature (20)..(21): n stands for thymidine
  misc_feature (20)..(20): Phosphorothioate or Phosphorodithioate 3'-Internucleotide Linkage (optionally present)
  misc_feature (21)..(21): 3'-3 attached terminal glyceryl moeity
gcgcagagcagcagcgcccnn

SEQ ID NO: 1826 - RNA, 21 nt, Artificial Sequence
  Description of Artificial Sequence:  siNA sense region
  misc_feature (1)..(3): 2'-deoxy
  misc_feature (5)..(5): 2'-deoxy
  misc_feature (8)..(8): 2'-deoxy
  misc_feature (11)..(11): 2'-deoxy
  misc_feature (16)..(16): 2'-deoxy
  misc_feature (18)..(18): 2'-deoxy
  misc_feature (4)..(4): 2'-deoxy-2'-Fluoro
  misc_feature (6)..(7): 2'-deoxy-2'-Fluoro
  misc_feature (9)..(10): 2'-deoxy-2'-Fluoro
  misc_feature (12)..(15): 2'-deoxy-2'-Fluoro
  misc_feature (17)..(17): 2'-deoxy-2'-Fluoro
  misc_feature (19)..(19): 2'-deoxy-2'-Fluoro
  misc_feature (1)..(1): 5'-3 attached terminal deoxyabasic moeity, inverted abasic, inverted nucleotide or other terminal cap that is optionally present
  misc_feature (21)..(21): 3'-3 attached terminal deoxyabasic moeity, inverted abasic, inverted nucleotide or other terminal cap that is optionally present
  misc_feature (20)..(21): n stands for thymidine
gggcgcugcugcucugcgcnn

SEQ ID NO: 1827 - RNA, 21 nt, Artificial Sequence
  Description of Artificial Sequence:  siNA sense region
  misc_feature (4)..(4): 2'-deoxy-2'-Fluoro
  misc_feature (6)..(7): 2'-deoxy-2'-Fluoro
  misc_feature (9)..(10): 2'-deoxy-2'-Fluoro
  misc_feature (12)..(15): 2'-deoxy-2'-Fluoro
  misc_feature (17)..(17): 2'-deoxy-2'-Fluoro
  misc_feature (19)..(19): 2'-deoxy-2'-Fluoro
  misc_feature (1)..(1): 5'-3 attached terminal deoxyabasic moeity, inverted abasic, inverted nucleotide or other terminal cap that is optionally present
  misc_feature (21)..(21): 3'-3 attached terminal deoxyabasic moeity, inverted abasic, inverted nucleotide or other terminal cap that is optionally present
  misc_feature (20)..(21): n stands for thymidine
gggcgcugcugcucugcgcnn

SEQ ID NO: 1828 - RNA, 21 nt, Artificial Sequence
  Description of Artificial Sequence:  siNA antisense region
  misc_feature (1)..(1): 2'-deoxy
  misc_feature (3)..(3): 2'-deoxy
  misc_feature (5)..(8): 2'-deoxy
  misc_feature (10)..(11): 2'-deoxy
  misc_feature (13)..(14): 2'-deoxy
  misc_feature (16)..(16): 2'-deoxy
  misc_feature (2)..(2): 2'-deoxy-2'-Fluoro
  misc_feature (4)..(4): 2'-deoxy-2'-Fluoro
  misc_feature (9)..(9): 2'-deoxy-2'-Fluoro
  misc_feature (12)..(12): 2'-deoxy-2'-Fluoro
  misc_feature (15)..(15): 2'-deoxy-2'-Fluoro
  misc_feature (17)..(19): 2'-deoxy-2'-Fluoro
  misc_feature (20)..(21): n stands for thymidine
  misc_feature (20)..(20): Phosphorothioate or Phosphorodithioate 3'-Internucleotide Linkage (optionally present)
  misc_feature (21)..(21): 3'-3 attached terminal glyceryl moeity or inverted deoxyabasic (optionally present)
gcgcagagcagcagcgcccnn

SEQ ID NO: 1829 - RNA, 14 nt, Artificial Sequence
  Description of Artificial Sequence:  Target Sequence
auauaucuauuucg

SEQ ID NO: 1830 - RNA, 14 nt, Artificial Sequence
  Description of Artificial Sequence:  Complement to Target Sequence
cgaaauaguauaua

SEQ ID NO: 1831 - RNA, 22 nt, Artificial Sequence
  Description of Artificial Sequence:  appended target/complement
cgaaauaguauauacuauuucg

SEQ ID NO: 1832 - RNA, 24 nt, Artificial Sequence
  Description of Artificial Sequence:  Duplex forming oligonucleotide
  misc_feature (23)..(24): n stands for thymidine
cgaaauaguauauacuauuucgnn
